(19) United States
(12) Patent Application Publication
(10) Pub. No.: US 2022/0220187 A1
(43) Pub. Date: Jul. 14, 2022

(54) CHIMERIC RECEPTOR THERAPY

(71) Applicant: PRECIGEN, INC., Germantown, MD (US)

(72) Inventors: Helen SABZEVARI, GERMANTOWN, MD (US); Cheryl G. BOLINGER, GERMANTOWN, MD (US); Rutul R. SHAH, GERMANTOWN, MD (US); ChangHung CHEN, GERMANTOWN, MD (US); Vinodhbabu KURELLA, Germantown, MD (US); Amy WESA, GERMANTOWN, MD (US)

(21) Appl. No.: 17/572,618

(22) Filed: Jan. 10, 2022

Related U.S. Application Data
(63) Continuation of application No. 63/136,074, filed on Jan. 11, 2021.
(60) Provisional application No. 63/136,611, filed on Jan. 12, 2021.
(60) Provisional application No. 63/263,001, filed on Oct. 25, 2021.
(60) Provisional application No. 63/263,508, filed on Nov. 3, 2021.

(51) Int. Cl. C07K 14/725; C07K 16/28; A61P 35/00

(52) U.S. Cl. CPC C07K 14/7051; C07K 16/2803; A61P 35/00; C07K 2317/21; A61K 2039/505; C07K 2317/622; C07K 2319/03; C07K 2319/02; C07K 2317/565

(57) ABSTRACT

A non-naturally occurring polynucleotide encoding a miRNA that inhibits the expression of an immune checkpoint protein. The polynucleotide may further encode a chimeric receptor, a cytokine, and/or a cell tag. A vector comprising the aforementioned polynucleotide. A modified immune effector cell comprising the aforementioned polynucleotide. Compositions and kits comprising the aforementioned polynucleotide and/or cell. A method for treating a subject suffering from a disease or disorder, comprising administering the aforementioned cell to a subject in need thereof. The use of the aforementioned cell in the manufacture of a medicament for the treatment of a disease or disorder. A method for the detection of a disease or disorder associated with the overexpression of an antigen in a subject. A method for the treatment of a disease or disorder comprising the serial administration of polynucleotides encoding a chimeric antigen receptor or a cell comprising the same.

### REFERENCE TO SEQUENCE LISTING

[0001] The instant application contains a Sequence Listing which has been submitted electronically in ASCII format and is hereby incorporated by reference in its entirety. Said ASCII copy, created on Jan. 10, 2022, is named 75594-348568_SL.txt and is 579,627 bytes in size.

### BACKGROUND OF THE DISCLOSURE

[0002] Chimeric antigen receptor (CAR-T) cell and T cell receptor (TCR) therapies have recently undergone rapid development and have been shown to successfully direct killing of tumor cells. Such therapies are, for example, useful in treating autoimmune disorders and cancers. Indeed, several targets for such therapies have been identified to date, including but not limited to CD19, CD33, BCMA, CD44, α-Folate receptor, CAIX, CD30, ROR1, CEA, EGP-2, EGP-40, HER2, HER3, Folate-binding Protein, GD2, GD3, IL-13R-a2, KDR, EDB-F, mesothelin, CD22, EGFR, Folate receptor α, Mucins such as MUC1, MUC4 or MUC16, MAGE-A1, h5T4, PSMA, TAG-72, EGFR, CD20, EGFRvIII, CD123 or VEGF-R2. Among these, CD19, CD33, MUC1, MUC16, and ROR1 have shown particular promise as targets for immunotherapy.

[0003] CD19 is an attractive target for immunotherapy due to several factors. It is expressed on a variety of B cell lymphomas and leukemias and on normal B cells, but it is not found on hematopoietic stem cells, plasma cells, and other healthy tissues. In addition, CD19 has a broader expression profile than that of CD20, which is the target of monoclonal antibody therapies such as rituximab, and it is thought to be a better target for antibody-drug conjugates (ADC) compared with CD20, which suffers from inefficient internalization. CD19 has also been shown to be expressed in cases where monoclonal antibody treatment (e.g., rituximab) is ineffective due to CD20 downregulation or other factors. Additionally, because CD19-targeting agents have a mode of action that is distinct from that of anti-CD20 antibodies, they could complement existing monoclonal antibody regimens.

[0004] CD33 is an attractive target for immunotherapy due to its high expression in cancer and minimal expression in healthy adult tissues. CD33 is overexpressed on myeloid leukemia and leukemic stem cells. CD33 is overexpressed in acute myeloid leukemia (AML), which is the most common acute leukemia in adults. 85 to 90% of AML patients show expression of CD33 on blast cells. CD33 is also overexpressed in myelodysplastic syndromes (MDS), which are cancerous conditions of the bone marrow generally found in adults in their 70s.

[0005] MUC1 is an attractive target for immunotherapy because it is overexpressed in breast cancer, and is absent or expressed at low levels in normal mammary glands. In addition, MUC1 is mostly aberrantly underglycosylated in cancer and the antigens on the cancer surface are different from those on normal cells. Therefore targeting MUC1 for cancer immunotherapy can exploit the differences between cancerous and normal cells.

[0006] MUC16 is an attractive target for immunotherapy due to its high expression in cancer and minimal expression in healthy adult tissues. MUC16 is aberrantly expressed in ovarian cancer, breast cancer, pancreatic cancer, endothermal cancer, and lung cancer. For example, MUC16 is overexpressed in over 80% of ovarian tumors, which is the most lethal of the gynecologic malignancies. Meanwhile, limited expression of MUC16 has been found on healthy tissue. The current standard of care for ovarian cancer is surgery, followed by chemotherapy with a combination of platinum agents and taxanes. However, recurrence of the disease occurs in most patients after initial treatment, resulting in a cycle of repeated surgeries and additional rounds of chemotherapy.

[0007] Receptor tyrosine kinase-like orphan receptor 1 (ROR1) is an attractive target for immunotherapy due to its high expression in cancer and minimal expression in healthy adult tissues. ROR1 is aberrantly expressed in multiple hematological tumors, including chronic lymphocytic leukemia (CLL), mantle cell lymphoma (MCL), acute lymphoblastic leukemia (ALL), and diffuse B-cell lymphoma (DLBCL) and solid tumors, including breast adenocarcinomas encompassing triple negative breast cancer (TNBC), pancreatic cancer, ovarian cancer, and lung adenocarcinoma.

[0008] Although many patients have durable responses with CAR-T and TCR therapies, for some patients the anti-tumor effects of such therapies are either short-lived or ineffective. Another immunotherapy that has shown promise is immune checkpoint inhibition, which can prevent the switching off of T cells and promote the activity of these cells. Examples of checkpoint inhibitor targets include but are not limited to PD1, PD-L1, CTLA-4, TIGIT, 4-1BB, PIK3IP1, CD27, CD28, CD40, CD70, CD122, CD137, OX40 (CD134), GITR, ICOS, A2AR, B7-H3 (CD276), B7-H4 (VTCN1), BTLA, IDO, KIR, LAG3, TIM-3, or VISTA. Among these, targeting CTLA4, PD-1, PD-L1, TIM3, TIGIT, LAG3, and/or PIK3IP1 has shown the most promise. One of the most studied checkpoint inhibition pathway is the PD-1/programmed death ligand 1 (PD-L1) pathway, which plays a vital role in how tumor cells evade immune response. Immunotherapy utilizing PD-1/PD-L1 blocking antibodies has been extensively evaluated in the clinic and has been shown to improve tumor regression across multiple malignancies, especially when administered in conjunction with CAR-T cells. However, checkpoint inhibitor blocking antibodies have not performed consistently across cancer types, may have limited access to the tumor microenvironment, require repeated administration, and may lose effectiveness over time. Genome editing is an alternate approach to eliminate PD-1 mediated CAR-T cell exhaustion, and has the advantage of restricting the PD-1 blockade to only the engineered CAR-T cells. However, gene editing adds complexity to the manufacturing process, which increases the turnaround time and cost of the cell therapy.

[0009] There is accordingly a continuing need in the art to obtain safer, more effective, less expensive therapies to antigen-associated diseases and conditions, including treatments that combine CAR-T and/or TCR therapy with systemic checkpoint inhibition.

[0010] There is also a need to devise ways of diversifying treatment regimens to provide a multi-pronged targeting of antigens in order to address complex in vivo biological issues such as loss of immunological surveillance, genetic alterations in tumor antigen composition and tumor heterogeneity (giving rise to cancer cell phenotypic differences).

### SUMMARY OF THE DISCLOSURE

[0011] The present invention relates in part to a non-naturally occurring polynucleotide encoding a miRNA that inhibits the expression of an immune checkpoint protein. In certain embodiments, the miRNA targets CTLA4, PD-1, PD-L1, TIM3, TIGIT, LAG3, GITR, or PIK3IP1. In certain embodiments, the miRNA targets PD-1.

[0012] In certain embodiments, the polynucleotide comprises a nucleic acid sequence having at least 80% sequence identity with any one of SEQ ID NOs: 72-87 or that is capable of hybridizing under stringent hybridization conditions to the complement of any one of SEQ ID NOs: 72-87. In certain such embodiments, the polynucleotide comprises a nucleic acid sequence having at least 80% sequence identity with any one of SEQ ID NOs: 72, 74, 76, 78, 80, 82, 84, and 86 or that is capable of hybridizing under stringent hybridization conditions to the complement of any one of SEQ ID NOs: 72, 74, 76, 78, 80, 82, 704, 705, 709, and 710. In certain embodiments, the polynucleotide comprises a nucleic acid sequence having at least 80% sequence identity with SEQ ID NO: 179 or 180 or that is capable of hybridizing under stringent hybridization conditions to the complement of SEQ ID NO: 179 or 180. In certain embodiments, the polynucleotide comprises a nucleic acid sequence having at least 80% sequence identity with SEQ ID NO: 267 or that is capable of hybridizing under stringent hybridization conditions to the complement of SEQ ID NO: 267.

[0013] In certain embodiments, the polynucleotide further comprises: a) a nucleic acid sequence having at least 80% sequence identity with SEQ ID NO: 292 or is capable of hybridizing under stringent hybridization conditions to the complement of SEQ ID NO: 291; and b) a nucleic acid sequence having at least 80% sequence identity with SEQ ID NO: 292 or is capable of hybridizing under stringent hybridization conditions to the complement of SEQ ID NO: 292.

[0014] In certain embodiments, the polynucleotide further encodes a chimeric receptor. In certain embodiments, the chimeric receptor is a T-cell receptor or a chimeric antigen receptor.

[0015] In certain embodiments, the chimeric antigen receptor comprises an antigen-binding domain that binds to an epitope on CD19, CD33, MUC1, MUC16, or ROR1. In certain embodiments, the antigen-binding domain binds to an epitope on ROR1.

[0016] In certain embodiments, the antigen-binding domain comprises a variable light chain domain comprising the amino acid sequence of any one of SEQ ID NOs: 347, 351, 355, 359, 363, 367, 371, 375, 379, 383, 387, 391, 395, 399, 403, 407, 411, 415, 419, 423, 427, 431, 435, 439, 443, 447, 451, 455, 459, and 463, or a functional fragment or variant thereof. In certain such embodiments, the variable light chain domain comprises the amino acid sequence of SEQ ID NO: 387 or a functional fragment or variant thereof.

[0017] In certain embodiments, the antigen-binding domain comprises a variable heavy chain domain comprising the amino acid sequence of any one of SEQ ID NOs: 349, 353, 357, 361, 365, 369, 373, 377, 381, 385, 389, 393, 397, 401, 405, 409, 413, 417, 421, 425, 429, 433, 437, 441, 445, 449, 453, 457, and 461, or a functional fragment or variant thereof. In certain such embodiments, the variable heavy chain domain comprises the amino acid sequence of SEQ ID NO: 349 or a functional fragment or variant thereof.

[0018] In certain embodiments, the chimeric antigen receptor comprises a spacer. In certain such embodiments, the spacer comprises a stalk region that is a CD8α hinge domain or a functional fragment or variant thereof. In certain such embodiments, the stalk region comprises the amino acid sequence of SEQ ID NO: 467 or a functional fragment or variant thereof. In certain embodiments, the spacer comprises a stalk extension region. In certain such embodiments, the stalk extension region comprises the amino acid sequence of SEQ ID NO: 473 or a functional fragment or variant thereof.

[0019] In certain embodiments, the chimeric antigen receptor further comprises a transmembrane domain. In certain such embodiments, the transmembrane domain comprises a CD8α transmembrane domain or a functional fragment or variant thereof. In certain such embodiments, the transmembrane domain comprises the amino acid sequence of SEQ ID NO: 475 or a functional fragment or variant thereof.

[0020] In certain embodiments, the chimeric antigen receptor further comprises an intracellular signaling domain. In certain such embodiments, the intracellular signaling domain comprises a CD3ζ signaling domain or a functional fragment or variant thereof. In certain such embodiments, the intracellular signaling domain comprises the amino acid sequence of SEQ ID NO: 479 or a functional fragment or variant thereof.

[0021] In certain embodiments, the intracellular signaling domain comprises a co-stimulatory domain. In certain such embodiments, the intracellular signaling domain comprises a CD28 signaling domain or a functional fragment or variant thereof. In certain embodiments, the intracellular signaling domain comprises the amino acid sequence of SEQ ID NO: 481 or a functional fragment or variant thereof.

[0022] In certain embodiments, the polynucleotide further encodes a cytokine. In certain embodiments, the cytokine is IL-15 or a functional fragment or variant thereof. In certain such embodiments, the cytokine comprises the amino acid sequence of SEQ ID NO: 519 or a functional fragment or variant thereof.

[0023] In certain embodiments, the IL-15, or functional fragment or variant thereof, is membrane bound. In certain such embodiments, the IL-15, or functional fragment or variant thereof, forms part of a fusion protein that also comprises IL-15Rα, or a functional fragment or variant thereof. In certain such embodiments, the fusion protein comprises the amino acid sequence of SEQ ID NO: 523 or a functional fragment or variant thereof. In certain embodiments, the fusion protein comprises the amino acid sequence of SEQ ID NO: 525 or a functional fragment or variant thereof.

[0024] In certain embodiments, the polynucleotide further encodes a cell tag. In certain embodiments, the cell tag comprises a truncated HER1, or a functional fragment or variant thereof. In certain embodiments, the truncated HER1 comprises a HER1 Domain III, or a functional fragment or variant thereof, and a truncated HER1 Domain IV, or a functional fragment or variant thereof. In certain such embodiments, the truncated HER1 comprises the amino acid sequence of SEQ ID NO: 565, or a functional fragment or variant thereof, and the amino acid sequence of SEQ ID NO: 567, or a functional fragment or variant thereof.

[0025] In certain embodiments, the cell tag further comprises a CD28 transmembrane domain or a functional fragment or variant thereof. In certain such embodiments, the cell tag comprises the amino acid sequence of SEQ ID NO: 571 or a functional fragment or variant thereof.

[0026] The present invention also relates to a vector comprising the aforementioned polynucleotide. The vector may be viral or non-viral. In certain embodiments, the vector comprises a Sleeping Beauty transposon.

[0027] The present invention further relates to a modified immune effector cell comprising the aforementioned polynucleotide. In certain embodiments, the cell is a T-cell.

[0028] The present invention additionally relates to compositions and kits comprising the aforementioned polynucleotide and/or cell.

[0029] A further aspect of the present invention is a method for treating a subject suffering from a disease or disorder, comprising administering the aforementioned cell to a subject in need thereof. The invention also relates to the use of the aforementioned cell in the manufacture of a medicament for the treatment of a disease or disorder. The disease or disorder may be one associated with the overexpression of an antigen, for example, CD19, CD33, ROR1, MUC1, or MUC16. In certain embodiments, the disease or disorder is one associated with the overexpression of ROR1.

[0030] In certain embodiments, the disease or disorder is cancer. In certain embodiments, the disease or disorder is chronic lymphocytic leukemia, mantle cell lymphoma, acute lymphoblastic leukemia, or diffuse large B-cell lymphoma, breast adenocarcinomas encompassing triple negative breast cancer, pancreatic cancer, ovarian cancer, or lung adenocarcinoma.

[0031] Another aspect of the present invention is a method for the detection of a disease or disorder associated with the overexpression of an antigen in a subject, the method comprising: a) contacting a sample from the subject with one or more of the antibodies, or antigen-binding fragments thereof; and b) detecting an increased level of binding of the antibody or fragment thereof to the sample as compared to such binding to a control sample lacking the disease, thereby detecting the disease in the subject.

[0032] A yet further aspect of the present invention is a method for the treatment of a disease or disorder, such as cancer and auto-immune disease or disorders, comprising the serial administration of cells, nucleic acids, viral vectors, or non-viral vectors comprising polynucleotides encoding chimeric antigen receptors selected from a collection of chimeric antigen receptors having different structural compositions and binding specificities for an array of antigen targets. In certain such embodiments, the method comprises a first administration of cells expressing one or more chimeric antigen receptors from the collection followed by a second administration of cells expressing one or more chimeric antigen receptors from the collection, wherein a period of time elapses between the first and second administrations.

### BRIEF DESCRIPTION OF THE DRAWINGS

[0033] FIG. 1A is an exemplary depiction of a vector comprising a combination of one or more checkpoint inhibitor miRNAs with a chimeric receptor (SD=Splice Donor; SA=Splice Acceptor).

[0034] FIG. 1B is an exemplary depiction of hairpin and loop design of various pri-miRNAs including target miRNA and complementary sequences at various 5′ or 3′ positions. FIG. 1C is exemplary depiction of hairpin and loop design of various pri-miRNAs including its position in a transgene cassette.

[0035] FIG. 2 is a graph depicting PD1 relative RNA expression following transfection of various combinations of miRNA constructs in the presence or absence of MUC16-specific CAR. Constructs #1-8 as depicted on the X-axis are as schematically presented in Table 10.

[0036] FIGS. 3A, 3B and 3C are graphs depicting normalized absolute transcript counts obtained from gene analysis of >700 genes using a Nanostring human gene panel code set with CD3/CD28 bead-stimulated CD33 CAR-T cells. In FIG. 3A, the Y-axis plots the transcript counts from CAR-T cells containing an intron coding for 2 checkpoint inhibitor miRNAs targeting PD-1 and TIGIT (CD33 CAR-mbIL15-HER1t+ miRNA (PD-1+TIGIT)), and the X-axis plots the transcripts from CAR-T cells only (not containing any checkpoint inhibitory miRNA). The circles denote the genes of interest. In FIG. 3B, the Y-axis plots the transcript counts from PD-1 miRNA containing CAR-T cells (CD33 CAR-mbIL15-HER1t+miRNA (PD-1+PD-1)) and the X-axis plots the transcripts from CAR-T cells only. FIG. 3C plots the non-targeting miRNA control (CD33 CAR-mbIL15-HER1t+miRNA scrambled*) on the Y-axis and CAR-T cells without a miRNA containing intron on the X-axis. The circles denote the genes of interest and used to depict the on-target specificity of the checkpoint inhibitor miRNA designs. All three graphs were derived from one donor. * Scrambled controls are non-targeting miRNAs.

[0037] FIG. 4A-C are graphs depicting the normalized absolute transcript counts obtained from gene analysis of >700 genes using a Nanostring human gene panel code set with CD3/CD28 bead stimulated MUC16-specific CAR-T cells. In FIG. 4A, the Y-axis plots the transcript counts from CAR-T cells containing an intron coding for miRNAs targeting two different sequences within PD-1 and a sequence for TIGIT (MUC16CAR-mbIL15-HER1t (collectively also referred to as “MUC16CAR”)+miRNA (PD-1/PD-1/TIGIT)), and the X-axis plots the transcripts from CAR-T cells without a miRNA-containing intron (MUC16CAR-mbIL15-HER1t). The black circles denote the genes of interest. In FIG. 4B, the X-axis is the same, and the Y-axis plots the transcript counts from dual PD-1 targeting miRNA containing CAR-T cells (MUC16CAR-mbIL15-HER1t+miRNA (PD-1/PD-1)). FIG. 4C plots the non-targeting miRNA control (MUC16CAR-mbIL15-HER1t+miRNA (scrambled)) on the Y-axis and CAR-T cells without a miRNA-containing intron on the X-axis. All three graphs are from one donor.

[0038] FIG. 5A is a graph depicting the number of GFP+K562 cells expressing MUC16 over time. The line with black circle filled dots at each time point denotes number GFP+ target cells in wells without CAR-T cells. The line with square open points denotes target cell counts in wells with MUC16 CAR-mbIL15-HER1t CAR-T cells without a miRNA-containing intron, ((“with CAR-T cells”)). The line with grey circle filled points denotes the target cell counts in wells with CAR-T cells containing a synthetic intron with dual PD-1 targeting miRNAs (MUC16 CAR-mbIL15-HER1t+miRNA (PD-1/PD-1) (“with CAR-T+miRNA cells”). Data are from one donor, plotted is the mean+SD of triplicate wells. *** P<0.001 based on a 2-way ANOVA with Dunnett's Multiple Comparison post hoc test.

[0039] FIG. 5B is a graph depicting the number of GFP+K562/MUC16+/PD-L1+/CD155+ cells over time. The line with square filled points at each time point denotes number GFP+ target cells only in wells. The line with open circle points denotes target cell counts in wells with MUC16-specific CAR-T cells without a miRNA-containing intron (MUC16 CAR-mbIL15-HER1t (with CAR-T cells)). The line with open circle filled points denotes the target cell counts in wells with CAR-T cells containing a synthetic intron with dual PD-1 and a TIGIT targeting miRNAs (MUC16CAR-mbIL15-HER1t+miRNA (PD-1/PD-1/TIGIT)(with CAR-T+miRNA cells)). Data are from one donor, plotted is the mean+SD of triplicate wells.

[0040] FIG. 6A-B depicts cytokine expression levels of IFN gamma and GM-CSF in MUC16 CAR-T cells with a combination of one or more checkpoint inhibitor miRNAs following co-culture with tumor target cells (K562/MUC16t). FIG. 6C-D depicts cytokine expression levels of IFN gamma and GM-CSF in MUC16 CAR-T cells with a combination of one or more checkpoint inhibitor miRNAs without co-culture with tumor target cells. Constructs #1-11 as depicted on the X-axis are as schematically presented in Table 11.

[0041] FIG. 7 shows the tumor burden in mice treated with MUC16 CAR+mbIL-15+HER1t (shown as “MUC16 CAR”) in combination with various miRNAs.

[0042] FIG. 8A demonstrates PD-1 levels in cell populations following gating hCD45/CD3+/HER1t+ expression in the blood of MUC16CAR+mbIL15+HER1t (CAR only) and MUC16CAR+mbIL15+HER1t+miRNA (PD1/PD-1) (CAR+miRNA (PD-1/PD-1)) treated mice.

[0043] FIG. 8B shows PD-1 levels as measured by median fluorescent intensity (MFI) in CAR and CAR+miRNA (PD-1/PD-1) treated mice.

[0044] FIGS. 9A and 9B demonstrates PD-1 and TIGIT MFI levels in cell populations following gating hCD45/CD3+/HER1t+ expression in the blood of various CAR and CAR+miRNA treated mice. Groups #1-9 as depicted on the X-axis are as schematically presented in Table 12.

[0045] FIG. 10A demonstrates that the PD1 silencer module produces guide miRNAs and a corresponding decrease in PD1 mRNA expression in UltraCAR-T cells generated from 5 T cell donors. RT-qPCR results of PD1-targeting guide miRNAs are depicted.

[0046] FIG. 10B demonstrates that the PD1 silencer module produced guide miRNAs and a corresponding decrease in PD1 mRNA expression in ultraCAR-T cells generated from 5 T cell donors. RT-qPCR results of PD1 mRNA are depicted.

[0047] FIG. 11 demonstrates that the PD1 silencing module preferentially produced PD1-targeting guide miRNAs over non-targeting passenger miRNAs.

[0048] FIGS. 12A-E demonstrate that guide miRNAs are the predominant small RNA species originating from the PD1 silencer module.

[0049] FIG. 13 shows quantification of mature miRNAs mapping to the PD1 silencer module as a percentage of total small RNAseq reads.

[0050] FIGS. 14 A and B shows differential gene expression in ROR1+PD1 silencer cells compared to ROR1 UltraCAR-T control cells.

[0051] FIGS. 15A-D show a comparison of predicted miRNA binding strength to transcript log fold change.

[0052] FIG. 16 provides an exemplary scheme for a genetic construct of the present disclosure.

[0053] FIG. 17 provides a schematic depiction of pathways and elements of the present disclosure.

[0054] FIG. 18 provides examples of pathways by which treatment regimens of the present disclosure can proceed.

[0055] FIG. 19 provides an indication of additional embodiments of the present disclosure.

[0056] FIG. 20 provides an indication of additional embodiments of the present disclosure.

### DETAILED DESCRIPTION OF THE DISCLOSURE

[0057] The following description and examples illustrate embodiments of the present disclosure in detail.

[0058] It is to be understood that the present disclosure is not limited to the particular embodiments described herein and as such can vary. Those of skill in the art will recognize that there are variations and modifications of the present disclosure, which are encompassed within the scope of the present invention.

[0059] Unless defined otherwise, all technical and scientific terms used herein have the same meaning as commonly understood by one of ordinary skill in the art to which the disclosure pertains.

[0060] The section headings used herein are for organizational purposes only and are not to be construed as limiting the subject matter described.

[0061] Although various features of the disclosure can be described in the context of a single embodiment, the features can also be provided separately or in any suitable combination. Conversely, although the present disclosure can be described herein in the context of separate embodiments for clarity, the present disclosure can also be implemented in a single embodiment.

[0062] The following definitions supplement those in the art and are directed to the current application and are not to be imputed to any related or unrelated case, e.g., to any commonly owned patent or application. The terminology used herein is for the purpose of describing particular embodiments only, and is not intended to be limiting.

### I. Definitions

[0063] In this application, the use of the singular includes the plural unless specifically stated otherwise. As used in the specification, the singular forms “a,” “an” and “the” include plural referents unless the context clearly dictates otherwise.

[0064] In this application, the use of “or” means “and/or” unless stated otherwise. The terms “and/or” and “any combination thereof” and their grammatical equivalents as used herein, can be used interchangeably. These terms can convey that any combination is specifically contemplated. Solely for illustrative purposes, the following phrases “A, B, and/or C” or “A, B, C, or any combination thereof” can mean “A individually; B individually; C individually; A and B; B and C; A and C; and A, B, and C.” The term “or” can be used conjunctively or disjunctively, unless the context specifically refers to a disjunctive use.

[0065] Furthermore, use of the term “including” as well as other forms, such as “include,” “includes,” and “included,” is not limiting.

[0066] Reference in the specification to “some embodiments,” “an embodiment,” “one embodiment” or “other embodiments” means that a particular feature, structure, or characteristic described in connection with the embodiments is included in at least some embodiments, but not necessarily all embodiments, of the present disclosures.

[0067] As used in this specification and the claim(s), the words “comprising” (and any form of comprising, such as “comprise” and “comprises”), “having” (and any form of having, such as “have” and “has”), “including” (and any form of including, such as “includes” and “include”) or “containing” (and any form of containing, such as “contains” and “contain”) are inclusive or open-ended and do not exclude additional, unrecited elements or method steps. It is contemplated that any embodiment discussed in this specification can be implemented with respect to any method or composition of the disclosure, and vice versa. Furthermore, compositions of the present disclosure can be used to achieve methods of the present disclosure.

[0068] The term “about” or “approximately” means within an acceptable error range for the particular value as determined by one of ordinary skill in the art, which will depend in part on how the value is measured or determined, i.e., the limitations of the measurement system. For example, “about” can mean within 1 or more than 1 standard deviation, per the practice in the art. Alternatively, “about” can mean a range of up to 20%, up to 10%, up to 5%, or up to 1% of a given value. In another example, the amount “about 10” includes 10 and any amounts from 9 to 11. In yet another example, the term “about” in relation to a reference numerical value can also include a range of values plus or minus 10%, 9%, 8%, 7%, 6%, 5%, 4%, 3%, 2%, or 1% from that value. Alternatively, particularly with respect to biological systems or processes, the term “about” can mean within an order of magnitude, preferably within 5-fold, and more preferably within 2-fold, of a value. Where particular values are described in the application and claims, unless otherwise stated the term “about” meaning within an acceptable error range for the particular value should be assumed.

[0069] A “therapeutically-effective amount” or “therapeutically-effective dose” refers to an amount or dose effective, for periods of time necessary, to achieve a desired therapeutic result. The amount can vary according to factors such as the disease state, age, sex, and weight of the individual, and the ability of the inventive nucleic acid sequences to elicit a desired response in the individual.

[0070] “Polynucleotide” or “oligonucleotide” refers to a polymeric form of nucleotides or nucleic acids of any length, either ribonucleotides or deoxyribonucleotides. This term refers only to the primary structure of the molecule. Thus, this term includes double and single stranded DNA, triplex DNA, as well as double and single stranded RNA. It also includes modified, for example, by methylation and/or by capping, and unmodified forms of the polynucleotide. The term is also meant to include molecules that include non-naturally occurring or synthetic nucleotides as well as nucleotide analogs.

[0071] Unless otherwise stated, nucleic acid sequences in the text of this specification are given, when read from left to right, in the 5′ to 3′ direction.

[0072] The terms “transfection,” “transformation,” “nucleofection,” or “transduction” as used herein refer to the introduction of one or more exogenous polynucleotides into a host cell or organism by using physical, chemical, and/or electrical methods. The nucleic acid sequences and vectors disclosed herein can be introduced into a cell or organism by any such methods, including, for example, by electroporation, calcium phosphate co-precipitation, strontium phosphate DNA co-precipitation, liposome mediated-transfection, DEAE dextran mediated-transfection, polycationic mediated-transfection, tungsten particle-facilitated microparticle bombardment, viral, and/or non-viral mediated transfection. In some cases, the method of introducing nucleic acids into the cell or organism involves the use of viral, retroviral, lentiviral, or transposon, or transposable element-mediated (e.g., Sleeping Beauty) vectors.

[0073] “Polypeptide,” “peptide,” and their grammatical equivalents as used herein refer to a polymer of amino acid residues. The polypeptide can optionally include glycosylation or other modifications typical for a given protein in a given cellular environment. Polypeptides and proteins disclosed herein (including functional fragments and functional variants thereof) can comprise synthetic amino acids in place of one or more naturally-occurring amino acids. Such synthetic amino acids are known in the art, and include, for example, aminocyclohexane carboxylic acid, norleucine, α-amino n-decanoic acid, homoserine, S-acetylaminomethyl-cysteine, trans-3- and trans-4-hydroxyproline, 4-aminophenylalanine, 4-nitrophenylalanine, 4-chlorophenylalanine, 4-carboxyphenylalanine, β-phenylserine β-hydroxyphenylalanine, phenylglycine, α-naphthylalanine, cyclohexylalanine, cyclohexylglycine, indoline-2-carboxylic acid, 1,2,3,4-tetrahydroisoquinoline-3-carboxylic acid, aminomalonic acid, aminomalonic acid monoamide, N′-benzyl-N′-methyl-lysine, N′,N′-dibenzyl-lysine, 6-hydroxylysine, ornithine, α-aminocyclopentane carboxylic acid, α-aminocyclohexane carboxylic acid, α-aminocycloheptane carboxylic acid, α-(2-amino-2-norbornane)-carboxylic acid, α,γ-diaminobutyric acid, α,β-diaminopropionic acid, homophenylalanine, and α-tert-butylglycine. The present disclosure further contemplates that expression of polypeptides or proteins described herein in an engineered cell can be associated with post-translational modifications of one or more amino acids of the polypeptide or protein. Non-limiting examples of post-translational modifications include phosphorylation, acylation including acetylation and formylation, glycosylation (including N-linked and O-linked), amidation, hydroxylation, alkylation including methylation and ethylation, ubiquitylation, addition of pyrrolidone carboxylic acid, formation of disulfide bridges, sulfation, myristoylation, palmitoylation, isoprenylation, farnesylation, geranylation, glypiation, lipoylation and iodination.

[0074] The term “conservative amino acid substitution” or “conservative mutation” refers to the replacement of one amino acid by another amino acid with a common property. A functional way to define common properties between individual amino acids is to analyze the normalized frequencies of amino acid changes between corresponding proteins of homologous organisms (Schulz, G. E. and Schirmer, R. H., Principles of Protein Structure, Springer-Verlag, New York (1979)). According to such analyses, groups of amino acids can be defined where amino acids within a group exchange preferentially with each other, and therefore resemble each other most in their impact on the overall protein structure (Schulz, G. E. and Schirmer, R. H., supra). Examples of conservative mutations include amino acid substitutions of amino acids within the sub-groups below, for example, lysine for arginine and vice versa such that a positive charge can be maintained; glutamic acid for aspartic acid and vice versa such that a negative charge can be maintained; serine for threonine such that a free —OH can be maintained; and glutamine for asparagine such that a free —NH2 can be maintained. Exemplary conservative amino acid substitutions are shown in the following chart:

| Type of Amino Acid | Substitutable Amino Acids |
|---|---|
| Hydrophilic | Ala, Pro, Gly, Glu, Asp, Gln, Asn, Ser, Thr |
| Sulphydryl | Cys |
| Aliphatic | Val, Ile, Leu, Met |
| Basic | Lys, Arg, His |
| Aromatic | Phe, Tyr, Trp |

[0075] An amino acid sequence that differs from a reference amino acid sequence by only conservative amino acid substitutions will be referred to herein as a “conservatively-substituted variant” of the reference sequence.

[0076] In some embodiments, the functional variants can comprise the amino acid sequence of the reference protein with at least one non-conservative amino acid substitution. The term “non-conservative mutations” involve amino acid substitutions between different groups, for example, lysine for tryptophan, or phenylalanine for serine, etc. In this case, it is preferable for the non-conservative amino acid substitution to not interfere with, or inhibit the biological activity of, the functional variant. The non-conservative amino acid substitution can enhance the biological activity of the functional variant, such that the biological activity of the functional variant is increased as compared to the homologous parent protein. Amino acid substitutability is discussed in more detail, for example, in L. Y. Yampolsky and A. Stoltzfus, “The Exchangeability of Amino acids in Proteins,” Genetics 2005 August; 170(4):1459-1472.

[0077] The terms “identical” and its grammatical equivalents as used herein or “sequence identity” in the context of two nucleic acid sequences or amino acid sequences of polypeptides refer to the residues in the two sequences which are the same when aligned for maximum correspondence over a specified comparison window. A “comparison window,” as used herein, refers to a segment of at least about 20 contiguous positions, usually about 50 to about 200, more usually about 100 to about 150 in which a sequence can be compared to a reference sequence of the same number of contiguous positions after the two sequences are aligned optimally. Methods of alignment of sequences for comparison are well-known in the art. Optimal alignment of sequences for comparison can be conducted by the local homology algorithm of Smith and Waterman, Adv. Appl. Math., 2:482 (1981); by the alignment algorithm of Needleman and Wunsch, J. Mol. Biol., 48:443 (1970); by the search for similarity method of Pearson and Lipman, Proc. Nat. Acad. Sci U.S.A., 85:2444 (1988); by computerized implementations of these algorithms (including, but not limited to CLUSTAL in the PC/Gene program by Intelligentics, Mountain View Calif., GAP, BESTFIT, BLAST, FASTA, and TFASTA in the Wisconsin Genetics Software Package, Genetics Computer Group (GCG), 575 Science Dr., Madison, Wis., U.S.A.); the CLUSTAL program is well described by Higgins and Sharp, Gene, 73:237-244 (1988) and Higgins and Sharp, CABIOS, 5:151-153 (1989); Corpet et al., Nucleic Acids Res., 16:10881-10890 (1988); Huang et al., Computer Applications in the Biosciences, 8:155-165 (1992); and Pearson et al., Methods in Molecular Biology, 24:307-331 (1994). Alignment is also often performed by inspection and manual alignment. In one class of embodiments, the polypeptides herein are at least 80%, 85%, 90%, 98% 99% or 100% identical to a reference polypeptide (i.e., the full length thereof), or a fragment thereof, e.g., as measured by BLASTP (or CLUSTAL, or any other available alignment software) using default parameters. Similarly, nucleic acids can also be described with reference to a starting nucleic acid, e.g., they can be 50%, 60%, 70%, 75%, 80%, 85%, 90%, 98%, 99% or 100% identical to a reference nucleic acid (i.e., the full length thereof) or a fragment thereof, e.g., as measured by BLASTN (or CLUSTAL, or any other available alignment software) using default parameters. When one molecule is said to have certain percentage of sequence identity with a larger molecule, it means that when the two molecules are optimally aligned, the percentage of residues in the smaller molecule finds a match residue in the larger molecule in accordance with the order by which the two molecules are optimally aligned.

[0078] For purposes of this specification and the claims, it is understood that the phrase “having at least 50% sequence identity with” a reference sequence, or referencing any range therein (e.g., “at least 80% sequence identity with”) encompasses the reference sequence itself. Thus, for example, a claim reciting “a nucleic acid having at least 80% sequence identity with SEQ ID NO: 0” encompasses SEQ ID NO: 0 itself.

[0079] The term “substantially identical” and its grammatical equivalents as applied to nucleic acid or amino acid sequences mean that a nucleic acid or amino acid sequence comprises a sequence that has at least 95% sequence identity with a reference sequence using the programs described above, e.g., BLAST, using standard parameters.

[0080] “Homology” is generally inferred from sequence identity between two or more nucleic acids or proteins (or sequences thereof). The precise percentage of identity between sequences that is useful in establishing homology varies with the nucleic acid and protein at issue, but as little as 25% sequence identity is routinely used to establish homology. Higher levels of sequence identity, e.g., 30%, 40%, 50%, 60%, 70%, 80%, 90%, 95%, or 99% or more can also be used to establish homology. Methods for determining sequence identity percentages (e.g., BLASTP and BLASTN using default parameters) are described herein and are generally available. Nucleic acids and/or nucleic acid sequences are “homologous” when they are derived, naturally or artificially, from a common ancestral nucleic acid or nucleic acid sequence. Proteins and/or protein sequences are “homologous” when their encoding DNAs are derived, naturally or artificially, from a common ancestral nucleic acid or nucleic acid sequence. The homologous molecules can be termed “homologs.” For example, any naturally occurring proteins can be modified by any available mutagenesis method. When expressed, this mutagenized nucleic acid encodes a polypeptide that is homologous to the protein encoded by the original nucleic acid.

[0081] Also contemplated and included herein are nucleic acid molecules that hybridize to the disclosed sequences. Hybridization conditions may be mild, moderate, or stringent, as is warranted.

[0082] Appropriate stringency conditions which promote DNA hybridization, for example, 6× sodium chloride/sodium citrate (SSC) at about 45° C., followed by a wash of 2×SSC at 50° C., are known or can be found in Current Protocols in Molecular Biology, John Wiley & Sons, N.Y. (1989), 6.3.1-6.3.6. “Stringent hybridization conditions” are those that include a salt concentration of 1.0 M NaCl in 50% formamide, at a temperature of 37° C. for 4 to 12 hours, followed by a wash in 0.1×SSC at 60-65° C.

[0083] As will be appreciated by the skilled practitioner, slight changes in nucleic acid sequence do not necessarily alter the amino acid sequence of the encoded polypeptide. This disclosure embraces the degeneracy of codon usage as would be understood by one of ordinary skill in the art. For example, as known in the art, different codons will code for the same amino acid as illustrated in the following chart.

| Amino Acid | Codons |
|---|---|
| Ala/A | GCT, GCC, GCA, GCG |
| Arg/R | CGT, CGC, CGA, CGG, AGA, AGG |
| Asn/N | AAT, AAC |
| Asp/D | GAT, GAC |
| Cys/C | TGT, UGC |
| Gln/Q | CAA, CAG |
| Glu/E | GAA, GAG |
| Gly/G | GGT, GGC, GGA, GGG |
| His/H | CAT, CAC |
| Ile/I | ATT, ATC, ATA |
| Leu/L | TTA, TTG, CTT, CTC, CTA, CTG |
| Lys/K | AAA, AAG |
| Met/M | ATG |
| Phe/F | TTT, TTC |
| Pro/P | CCT, CCC, CCA, CCG |
| Ser/S | TCT, TCC, TCA, TCG, AGT, AGC |
| Thr/T | ACT, ACC, ACA, ACG |
| Trp/W | TGG |
| Tyr/Y | TAT, TAC |
| Val/V | GTT, GTC, GTA, GTG |
| START | ATG |
| STOP | TAG, TGA, TAA |

[0084] As used herein, the phrase “codon degenerate variant” when used with reference to a nucleic acid sequence means a nucleic acid sequence that differs from the referenced sequence, but that encodes a polypeptide having the same amino acid sequence as that encoded by the referenced sequence.

[0085] Additionally, it will be appreciated by persons skilled in the art that partial sequences often work as effectively as full-length versions. The ways in which the nucleotide sequence can be varied or shortened are well known to persons skilled in the art, as are ways of testing the suitability or effectiveness of the altered genes. In certain embodiments, suitability and/or effectiveness of the altered gene may easily be tested by, for example, conventional gas chromatography. All such variations of the genes are therefore included as part of the present disclosure.

[0086] The term “isolated” and its grammatical equivalents as used herein refer to the removal of a nucleic acid from its natural environment. It is to be understood, however, that nucleic acids and proteins can be formulated with diluents or adjuvants and still for practical purposes be isolated.

[0087] The term “purified” and its grammatical equivalents as used herein refer to a molecule or composition, whether removed from nature (including genomic DNA and mRNA) or synthesized (including cDNA) and/or amplified under laboratory conditions, that has been increased in purity, wherein “purity” is a relative term, not “absolute purity.” For example, nucleic acids typically are mixed with an acceptable carrier or diluent when used for introduction into cells. The term “substantially purified” and its grammatical equivalents as used herein refer to a nucleic acid sequence, polypeptide, protein or other compound that is essentially free, i.e., is more than about 50% free of, more than about 70% free of, more than about 90% free of, the polynucleotides, proteins, polypeptides and other molecules that the nucleic acid, polypeptide, protein or other compound is naturally associated with.

[0088] “T cell” or “T lymphocyte” as used herein is a type of lymphocyte that plays a central role in cell-mediated immunity. They can be distinguished from other lymphocytes, such as B cells and natural killer cells (NK cells), by the presence of a T-cell receptor (TCR) on the cell surface.

[0089] “Transposon,” “transposable element” or “TE” refers to a vector DNA sequence that can change its position within the genome, sometimes creating or reversing mutations and altering the cell's genome size. Transposition often results in duplication of the transposon. Class I transposons are copied in two stages: first, they are transcribed from DNA to RNA, and the RNA produced is then reverse transcribed to DNA. This copied DNA is then inserted at a new position into the genome. The reverse transcription step is catalyzed by a reverse transcriptase, which can be encoded by the transposon itself. The characteristics of retrotransposons are similar to retroviruses, such as HIV. The cut-and-paste transposition mechanism of class II transposons does not involve an RNA intermediate. The transpositions are catalyzed by several transposase enzymes. Some transposases non-specifically bind to any target site in DNA, whereas others bind to specific DNA sequence targets. The transposase makes a staggered cut at the target site resulting in single-strand 5′ or 3′ DNA overhangs (sticky ends). This step cuts out the DNA transposon, which is then ligated into a new target site; this process involves activity of a DNA polymerase that fills in gaps and of a DNA ligase that closes the sugar-phosphate backbone. This results in duplication of the target site. The insertion sites of DNA transposons can be identified by short direct repeats which can be created by the staggered cut in the target DNA and filling in by DNA polymerase, followed by a series of inverted repeats important for the transposon excision by transposase. Cut-and-paste transposons can be duplicated if their transposition takes place during S phase of the cell cycle when a donor site has already been replicated, but a target site has not yet been replicated. Transposition can be classified as either “autonomous” or “non-autonomous” in both Class I and Class II transposons. Autonomous transposons can move by themselves while non-autonomous transposons require the presence of another transposon to move. This is often because non-autonomous transposons lack transposase (for class II) or reverse transcriptase (for class I).

[0090] “Transposase” refers an enzyme that binds to the end of a transposon and catalyzes the movement of the transposon to another part of the genome by a cut and paste mechanism or a replicative transposition mechanism. In some embodiments, the transposase's catalytic activity can be utilized to move gene(s) from a vector to the genome.

[0091] An “expression vector” or “vector” is any genetic element, e.g., a plasmid, a mini-circle, a nanoplasmid, chromosome, virus, transposon, behaving either as an autonomous unit of polynucleotide replication within a cell. (i.e. capable of replication under its own control) or being rendered capable of replication by insertion into a host cell chromosome, having attached to it another polynucleotide segment, so as to bring about the replication and/or expression of the attached segment. Suitable vectors include, but are not limited to, plasmids, transposons, bacteriophages and cosmids. Vectors can contain polynucleotide sequences that are necessary to effect ligation or insertion of the vector into a desired host cell and to effect the expression of the attached segment. Such sequences differ depending on the host organism; they include promoter sequences to effect transcription, enhancer sequences to increase transcription, ribosomal binding site sequences and transcription and translation termination sequences. Alternatively, expression vectors can be capable of directly expressing nucleic acid sequence products encoded therein without ligation or integration of the vector into host cell DNA sequences. In some embodiments, the vector is an “episomal expression vector” or “episome,” which is able to replicate in a host cell, and persists as an extrachromosomal segment of DNA within the host cell in the presence of appropriate selective pressure (see, e.g., Conese et al., Gene Therapy, 11:1735-1742 (2004)). Representative commercially-available episomal expression vectors include, but are not limited to, episomal plasmids that utilize Epstein Barr Nuclear Antigen 1 (EBNA1) and the Epstein Barr Virus (EBV) origin of replication (oriP). The vectors pREP4, pCEP4, pREP7, and pcDNA3.1 from Invitrogen (Carlsbad, Calif.) and pBK-CMV from Stratagene (La Jolla, Calif.) represent non-limiting examples of an episomal vector that uses T-antigen and the SV40 origin of replication in lieu of EBNA1 and oriP. A vector also can comprise a selectable marker gene. In certain embodiments where nano plasmids are utilized, strains such as R6K that utilizes an antisense RNA selection marker (e.g. sucrose tolerance) can be used.

[0092] The term “selectable marker gene” refers to a nucleic acid sequence that allows cells expressing the nucleic acid sequence to be specifically selected for or against, in the presence of a corresponding selective agent. Suitable selectable marker genes are known in the art and described in, e.g., International Patent Application Publications WO 1992/08796 and WO 1994/28143; Wigler et al., Proc. Natl. Acad. Sci. USA, 77: 3567 (1980); O'Hare et al., Proc. Natl. Acad. Sci. USA, 78: 1527 (1981); Mulligan & Berg, Proc. Natl. Acad. Sci. USA, 78: 2072 (1981); Colberre-Garapin et al., J. Mol. Biol., 150:1 (1981); Santerre et al., Gene, 30: 147 (1984); Kent et al., Science, 237: 901-903 (1987); Wigler et al., Cell, 11: 223 (1977); Szybalska & Szybalski, Proc. Natl. Acad. Sci. USA, 48: 2026 (1962); Lowy et al., Cell, 22: 817 (1980); and U.S. Pat. Nos. 5,122,464 and 5,770,359.

[0093] The term “coding sequence” refers to a segment of a polynucleotide that encodes for protein or polypeptide. The region or sequence is bounded nearer the 5′ end by a start codon and nearer the 3′ end with a stop codon. Coding sequences can also be referred to as open reading frames.

[0094] The term “operably linked” refers to refers to the physical and/or functional linkage of a DNA segment to another DNA segment in such a way as to allow the segments to function in their intended manners. A DNA sequence encoding a gene product is operably linked to a regulatory sequence when it is linked to the regulatory sequence, such as, for example, promoters, enhancers and/or silencers, in a manner, that allows modulation of transcription of the DNA sequence, directly or indirectly. For example, a DNA sequence is operably linked to a promoter when it is ligated to the promoter downstream with respect to the transcription initiation site of the promoter and in the correct reading frame with respect to the transcription initiation site so as to allow transcription elongation to proceed through the DNA sequence. An enhancer or silencer is operably linked to a DNA sequence coding for a gene product when it is ligated to the DNA sequence in such a manner as to, respectively, increase or decrease the transcription of the DNA sequence. Enhancers and silencers can be located upstream or downstream of or embedded within the coding regions of the DNA sequence. A DNA for a signal sequence is operably linked to DNA coding for a polypeptide if the signal sequence is expressed as a pre-protein that participates in the secretion of the polypeptide. Linkage of DNA sequences to regulatory sequences is typically accomplished by ligation at suitable restriction sites or via adapters or linkers inserted in the sequence using restriction endonucleases known to one of skill in the art.

[0095] The terms “induce,” “induction” and their grammatical equivalents as used herein refer to an increase in nucleic acid sequence transcription, promoter activity and/or expression brought about by a transcriptional regulator, relative to some basal level of transcription.

[0096] The term “transcriptional regulator” refers to a biochemical element that acts to prevent or inhibit the transcription of a promoter-driven DNA sequence under certain environmental conditions (e.g., a repressor or nuclear inhibitory protein), or to permit or stimulate the transcription of the promoter-driven DNA sequence under certain environmental conditions (e.g., an inducer or an enhancer).

[0097] The term “enhancer,” as used herein, refers to a DNA sequence that increases transcription of, for example, a nucleic acid sequence to which it is operably linked. Enhancers can be located many kilobases away from the coding region of the nucleic acid sequence and can mediate the binding of regulatory factors, patterns of DNA methylation, or changes in DNA structure. A large number of enhancers from a variety of different sources are well known in the art and are available as or within cloned polynucleotides (from, e.g., depositories such as the ATCC as well as other commercial or individual sources). A number of polynucleotides comprising promoters (such as the commonly-used CMV promoter) also comprise enhancer sequences. Enhancers can be located upstream or downstream of coding sequences or within coding sequences. The term “Ig enhancers” refers to enhancer elements derived from enhancer regions mapped within the immunoglobulin (Ig) locus (such enhancers include for example, the heavy chain (mu) 5′ enhancers, light chain (kappa) 5′ enhancers, kappa and mu intronic enhancers, and 3′ enhancers (see generally Paul W. E. (ed), Fundamental Immunology, 3rd Edition, Raven Press, New York (1993), pages 353-363; and U.S. Pat. No. 5,885,827).

[0098] The term “promoter” refers to a region of a polynucleotide that initiates transcription of a coding sequence. Promoters are located near the transcription start sites of genes, on the same strand and upstream on the DNA (towards the 5′ region of the sense strand). Some promoters are constitutive as they are active in all circumstances in the cell, while others are regulated becoming active in response to specific stimuli, e.g., an inducible promoter. The term “promoter activity” and its grammatical equivalents as used herein refer to the extent of expression of nucleotide sequence that is operably linked to the promoter whose activity is being measured. Promoter activity can be measured directly by determining the amount of RNA transcript produced, for example by Northern blot analysis or indirectly by determining the amount of product coded for by the linked nucleic acid sequence, such as a reporter nucleic acid sequence linked to the promoter.

[0099] “Inducible promoter” refers to a promoter, that is induced into activity by the presence or absence of transcriptional regulators, e.g., biotic or abiotic factors. Inducible promoters are useful because the expression of genes operably linked to them can be turned on or off at certain stages of development of an organism or in a particular tissue. Non-limiting examples of inducible promoters include alcohol-regulated promoters, tetracycline-regulated promoters, steroid-regulated promoters, metal-regulated promoters, pathogenesis-regulated promoters, temperature-regulated promoters and light-regulated promoters. The inducible promoter can be part of a gene switch or genetic switch.

[0100] “T cell” or “T lymphocyte” as used herein is a type of lymphocyte that plays a central role in cell-mediated immunity. They can be distinguished from other lymphocytes, such as B cells and natural killer cells (NK cells), by the presence of a T-cell receptor (TCR) on the cell surface.

[0101] As used herein, the phrase “functional fragment” when used with reference to a polypeptide refers to a fragment of such polypeptide that possesses the primary function of the referenced polypeptide. For example, a functional fragment of a polypeptide that serves as a transmembrane domain is a fragment of that polypeptide that also serves as a transmembrane domain. In certain embodiments, the functional fragment of a polypeptide is shorter than the referenced polypeptide by at most 30, 25, 20, 15, 10, 9, 8, 7, 6, 5, 4, 3, 2, or 1 amino acid residues at the N- and/or C-terminus. When used with reference to a nucleic acid, the phrase “functional fragment” refers to a fragment of the referenced nucleic acid that encodes a polypeptide having the same primary function as the polypeptide encoded by the referenced nucleic acid.

[0102] As used herein, the phrase “functional variant” when used with reference to a polypeptide refers to a polypeptide that differs from the referenced polypeptide but possesses the primary function of the referenced polypeptide. For example, a functional variant of a polypeptide that serves as a transmembrane domain is a fragment of that polypeptide that also serves as a transmembrane domain. In certain embodiments, the functional variant has at least 80%, 85%, 90%, 95%, 96%, 97%, 98%, or 99% sequence identity with the referenced amino acid sequence and/or is a conservatively-substituted variant of the referenced sequence. When used with reference to a nucleic acid, the phrase “functional variant” refers to a nucleic acid that differs from the referenced nucleic acid but encodes a polypeptide having the same primary function as the polypeptide encoded by the referenced nucleic acid. In certain embodiments, the functional variant has at least 80%, 85%, 90%, 95%, 96%, 97%, 98%, or 99% sequence identity with the referenced nucleic acid sequence, hybridizes under stringent hybridization conditions with the complement of the referenced nucleic acid sequence, or is a codon degenerate variant of the nucleic acid sequence.

[0103] The term “antibody,” also known as immunoglobulin (Ig), as used herein can refer to a monoclonal or polyclonal antibody. The term “monoclonal antibodies,” as used herein, refers to antibodies that are produced by a single clone of B-cells and bind to the same epitope. In contrast, “polyclonal antibodies” refer to a population of antibodies that is produced by different B-cells and bind to different epitopes of the same antigen. The antibodies can be from any animal origin. An antibody can be IgG (including IgG1, IgG2, IgG3, and IgG4), IgA (including IgA1 and IgA2), IgD, IgE, or IgM, and IgY. In some embodiments, the antibody can a single-chain whole antibody. An antibody typically consists of four polypeptides: two identical copies of a heavy (H) chain polypeptide and two identical copies of a light (L) chain polypeptide. Each of the heavy chains contains one N-terminal variable (V_{H}) region and three C-terminal constant (CH1, CH2 and CH3) regions, and each light chain contains one N-terminal variable (V_{L}) region and one C-terminal constant (C_{L}) region. The variable regions of each pair of light and heavy chains form the antigen-binding site of an antibody. The V_{H} and V_{L} regions have a similar general structure, with each region comprising four framework regions, whose sequences are relatively conserved. The framework regions are connected by three complementarity determining regions (CDRs). The three CDRs, known as CDR1, CDR2, and CDR3, form the “hypervariable region” of an antibody, which is responsible for antigen binding. These particular regions have been described by Kabat et al., J. Biol. Chem. 252, 6609-6616 (1977) and Kabat et al., Sequences of protein of immunological interest. (1991), by Chothia et al., J. Mol. Biol. 196:901-917 (1987), and by MacCallum et al., J. Mol. Biol. 262:732-745 (1996), where the definitions include overlapping or subsets of amino acid residues when compared against each other. Preferably, the term “CDR” is a CDR as defined by Kabat, based on sequence comparisons. CDRH1, CDRH2 and CDRH3 denote the heavy chain CDRs, and CDRL1, CDRL2 and CDRL3 denote the light chain CDRs.

[0104] The terms “fragment of an antibody,” “antibody fragment,” “fragment of an antibody,” “antigen-binding portion” and their grammatical equivalents are used interchangeably herein to mean one or more fragments or portions of an antibody that retain the ability to specifically bind to an antigen (see, generally, Holliger et al., Nat. Biotech., 23(9):1126-1129 (2005)). The antibody fragment desirably comprises, for example, one or more CDRs, the variable region (or portions thereof), the constant region (or portions thereof), or combinations thereof. Non-limiting examples of antibody fragments include (1) a Fab fragment, which is a monovalent fragment consisting of the V_{L}, V_{H}, C_{L}, and CH1 domains; (2) a F(ab′)2 fragment, which is a bivalent fragment comprising two Fab fragments linked by a disulfide bridge at the stalk region; (3) a Fv fragment consisting of the V_{L} and V_{H} domains of a single arm of an antibody; (4) a single chain Fv (scFv), which is a monovalent molecule consisting of the two domains of the Fv fragment (i.e., V_{L} and V_{H}) joined by a linker that enables the two domains to be synthesized as a single polypeptide chain (see, e.g., Bird et al., Science, 242: 423-426 (1988); Huston et al., Proc. Natl. Acad. Sci. USA, 85: 5879-5883 (1988); and Osbourn et al., Nat. Biotechnol., 16: 778 (1998)) and (5) a diabody, which is a dimer of polypeptide chains, wherein each polypeptide chain comprises a V_{H} connected to a V_{L} by a peptide linker that is too short to allow pairing between the V_{H} and V_{L} on the same polypeptide chain, thereby driving the pairing between the complementary domains on different V_{H}-V_{L} polypeptide chains to generate a dimeric molecule having two functional antigen-binding sites. Antibody fragments are known in the art and are described in more detail in, e.g., U.S. Pat. No. 8,603,950.

[0105] The terms “antigen recognition moiety,” “antigen recognition domain,” “antigen-binding domain,” and “antigen binding region” refer to a molecule or portion of a molecule that specifically binds to an antigen. In one embodiment, the antigen recognition moiety is an antibody, antibody like molecule or fragment thereof.

[0106] The term “proliferative disease” refers to a unifying concept in which excessive proliferation of cells and/or turnover of cellular matrix contributes significantly to the pathogenesis of the disease, including cancer. In some embodiments, the proliferative disease is cancer.

[0107] “Patient” or “subject” refers to a mammalian subject diagnosed with or suspected of having or developing a proliferative disorder such as cancer. In some embodiments, the term “patient” refers to a mammalian subject with a higher than average likelihood of developing a proliferative disorder such as cancer. Exemplary patients can be humans, apes, dogs, pigs, cattle, cats, horses, goats, sheep, rodents and other mammalians that can benefit from the therapies disclosed herein. Exemplary human patients can be male and/or female. “Patient in need thereof” or “subject in need thereof” means a patient diagnosed with or suspected of having a disease or disorder, for instance, but not restricted to cancer.

[0108] “Administering” refers to herein as providing one or more compositions described herein to a patient or a subject. By way of example and not limitation, composition administration, e.g., injection, can be performed by intravenous (i.v.) injection, sub-cutaneous (s.c.) injection, intradermal (i.d.) injection, intraperitoneal (i.p.) injection, or intramuscular (i.m.) injection. One or more such routes can be employed. Parenteral administration can be, for example, by bolus injection or by gradual perfusion over time. Alternatively, or concurrently, administration can be by the oral route. Additionally, administration can also be by surgical deposition of a bolus or pellet of cells, or positioning of a medical device.

[0109] As used herein, the terms “treatment,” “treating,” and their grammatical equivalents refer to obtaining a desired pharmacologic and/or physiologic effect. In some embodiments, the effect is therapeutic, i.e., the effect partially or completely cures a disease and/or adverse symptom attributable to the disease. In some embodiments, the term “treating” can include “preventing” a disease or a condition.

[0110] As used herein, a “treatment interval” refers to a treatment cycle, for example, a course of administration of a therapeutic agent that can be repeated, e.g., on a regular schedule. In some embodiments, a dosage regimen can have one or more periods of no administration of the therapeutic agent in between treatment intervals.

[0111] The terms “administered in combination,” “co-administration,” “co-administering,” and “co-providing” as used herein, mean that two (or more) different treatments are delivered to the subject during the course of the subject's affliction with the disorder, e.g., the two or more treatments are delivered after the subject has been diagnosed with the disorder and before the disorder has been cured or eliminated or treatment has ceased for other reasons. In some embodiments, the delivery of one treatment is still occurring when the delivery of the second begins, so that there is overlap in terms of administration. This is sometimes referred to herein as “simultaneous” or “concurrent delivery.” In other embodiments, the delivery of one treatment ends before the delivery of the other treatment begins. In some embodiments of either case, the treatment is more effective because of combined administration. For example, the second treatment is more effective, e.g., an equivalent effect is seen with less of the second treatment, or the second treatment reduces symptoms to a greater extent, than would be seen if the second treatment were administered in the absence of the first treatment, or the analogous situation is seen with the first treatment. In some embodiments, delivery is such that the reduction in a symptom, or other parameter related to the disorder is greater than what would be observed with one treatment delivered in the absence of the other. The effect of the two treatments can be partially additive, wholly additive, or greater than additive. The delivery can be such that an effect of the first treatment delivered is still detectable when the second is delivered.

[0112] In some embodiments, the first treatment and second treatment can be administered simultaneously (e.g., at the same time), in the same or in separate compositions, or sequentially. Sequential administration refers to administration of one treatment before (e.g., immediately before, less than 5, 10, 15, 30, 45, 60 minutes; 1, 2, 3, 4, 6, 8, 10, 12, 16, 20, 24, 48, 72, 96 or more hours; 4, 5, 6, 7, 8, 9 or more days; 1, 2, 3, 4, 5, 6, 7, 8 or more weeks before) administration of an additional, e.g., secondary, treatment. The order of administration of the first and secondary treatment can also be reversed.

[0113] The terms “therapeutically effective amount,” therapeutic amount,” “immunologically effective amount,” “anti-tumor effective amount,” “tumor-inhibiting effective amount,” and their grammatical equivalents refer to an amount effective, at dosages and for periods of time necessary, to achieve a desired therapeutic result. The therapeutically effective amount can vary according to factors such as the disease state, age, sex, and weight of the individual, and the ability of a composition described herein to elicit a desired response in one or more subjects. The precise amount of the compositions of the present disclosure to be administered can be determined by a physician with consideration of individual differences in age, weight, tumor size, extent of infection or metastasis, and condition of the patient (subject).

[0114] Alternatively, the pharmacologic and/or physiologic effect of administration of one or more compositions described herein to a patient or a subject of can be “prophylactic,” i.e., the effect completely or partially prevents a disease or symptom thereof. A “prophylactically effective amount” refers to an amount effective, at dosages and for periods of time necessary, to achieve a desired prophylactic result (e.g., prevention of disease onset).

[0115] As used herein, the term “immune checkpoint protein” refers to a molecule that transmits a suppressive signal or has an immunosuppressive function. Examples of such immune checkpoint proteins include, but are not limited to, CTLA-4, PD-1, PD-L1 (programmed cell death-ligand 1), PD-L2 (programmed cell death-ligand 2), LAG-3 (Lymphocyte activation gene 3), TIM3 (T cell immunoglobulin and mucin-3), BTLA (B and T lymphocyte attenuator), B7H3, B7H4, CD160, CD39, CD70, CD73, A2aR (adenosine A2a receptor), KIR (killer inhibitory receptor), VISTA (V-domain Ig-containing suppressor of T cell activation), IDO1 (Indoleamine 2,3-dioxygenase), Arginase I, TIGIT (T cell immunoglobulin and ITIM domain), CD115, and the like (see, Nature Reviews Cancer, 12, p. 252-264, 2012 and Cancer Cell, 27, p. 450-461, 2015).

[0116] As used herein, terms used in the identification of biological moieties may include, or may not include, a dash “-” within the term. The presence or absence of a dash does not change the intended meaning or identification of the biological moiety. By way of illustration only, and without limitation to these biological moieties, each of the following paired terms (shown with/without a dash) indicate and identify the same biological entities: CCR-4/CCR4, CD-3/CD3, CD-4/CD4, CD-33/CD33, EGFR-2/EGFR2, FLT-1/FLT1, HER-1/HER1, HER-1t/HER1t, IL-12/IL12, IL-15/IL15, IL-15Ra/IL15Rα MUC-1/MUC1, MUC-16/MUC16, ROR-1/ROR1, ROR-1R/ROR1R, TGF-Beta/TGFBeta, VEGF-1/VEGF1, VEGF-R2/VEGFR2.”

### II. Combinations

[0117] In certain embodiments, miRNA(s) or polynucleotides encoding the miRNA(s) as described herein can be used in combination with a chimeric receptor or can further comprise a nucleic acid sequence encoding a chimeric receptor, respectively. In some cases, the chimeric receptor is a chimeric antigen receptor (CAR). In some instances, the CAR comprises a pattern-recognition receptor. In other cases, the chimeric receptor comprises an engineered T-cell receptor (TCR). The miRNA(s) can be used in combination with specific CARs, cytokines, and cell tags, for example MUC16-specific CAR with a fusion protein comprising IL15 and IL-15Rα (mbIL15) and truncated HER1 (HER1t), MUC1-specific CAR with mbIL15 and HER1t, or CD33-specific CAR with mbIL15 and HER1t.
[0118] In certain embodiments, the genetic construct can include a 5′ untranslated region (5′UTR) and/or a 3′ untranslated region (3′UTR). In some embodiments, the sequences encoding the miRNA(s) can be located in the 5′UTR and/or the 3′UTR. In some embodiments, the 5′UTR and/or the 3′UTR do not contain an intron.

[0119] In certain embodiments, a nucleic acid sequence encoding a synthetic intron with checkpoint inhibitor miRNAs is inserted into the same genetic construct as that encoding the chimeric receptor (for example, in the portion of the construct corresponding to the 5′UTR of the mRNA encoding the chimeric receptor). An exemplary depiction of the order of polynucleotide sequences can be found in FIG. 1A. In one embodiment, the 5′UTR contains one or more mature miRNAs. In some embodiments, the one or more mature miRNA(s) can be directed to the same immune checkpoint protein target, for example PD-1. In certain other embodiments, the mature miRNAs can be directed to more than one immune checkpoint protein target, for example PD-1 and TIGIT, PD1 and CTLA4, or TIGIT and CTLA4.

### III. miRNA(s)

[0120] As used herein, the terms “miR,” “mir” and “miRNA” are used to refer to microRNA, a class of small non-coding RNA molecules that are capable of affecting the expression of a gene (the “target gene”) by modulating the translation of messenger RNA transcribed therefrom (either increasing or decreasing the gene's expression) and/or destabilizing such messenger RNA.

[0121] The miRNAs can be non-naturally occurring. The terms “non-naturally occurring,” “synthetic,” and “artificial,” as used to describe miRNA(s) herein, are used interchangeably and refer to an miRNA having a sequence that does not occur in nature. In some embodiments, a non-naturally occurring miRNA effectively mimics naturally-occurring miRNA. Non-naturally occurring miRNA can be designed such that the desired hairpins or loops of the corresponding naturally-occurring miRNA are maintained when a naturally-occurring mature miRNA sequence is replaced with a synthetic sequence designed to target a specific transcript. For example, the non-naturally occurring miRNA can have at least about 50%, at least about 55%, at least about 60%, at least about 65%, at least about 70%, at least about 75%, at least about 80%, at least about 85%, at least about 90%, at least about 95%, at least about 96%, at least about 97%, at least about 98%, at least about 99%, or greater sequence identity with naturally-occurring miRNA and/or can hybridize under stringent hybridization conditions with naturally-occurring miRNA. The term “miRNA,” unless otherwise indicated, refers generically to the mature, pri-, and pre-forms of a particular microRNA and functional fragments and variants thereof.

[0122] The term “pri-miRNA” refers to the primary miRNA transcript containing at least one RNA hairpin. Exemplary depictions of pri-miRNA are illustrated in FIG. 1B. The RNA hairpin(s) are cleaved from the pri-miRNA in the cell nucleus to form one or more precursor miRNAs (“pre-miRNAs). This pre-miRNA is exported into the cytoplasm where the stem loop structure is cleaved to produce a double-stranded miRNA comprising a miRNA-5p strand from the former 5′ arm of the hairpin loop and a miRNA-3p strand from the former 3′ arm of the hairpin loop. The Argonaute protein then binds the double-stranded miRNA and one of the strands (either the miRNA-5p sequence or the miRNA-3p sequence) is released. The remaining bound strand become the “guide strand” whereas the released strand is known as the “passenger strand” and preferably degrades. The guide strand then goes on to interact with the messenger RNA derived from the target gene, thus affecting its translation.

[0123] Both the miRNA-5p and miRNA-3p strand sequences will be referred to herein as “mature miRNA” sequences. The remaining portions of the pri-miRNA (the portion thereof 5′ to the miRNA-5p sequence, the portion thereof 3′ to the miRNA-3p sequence, and the stem loop sequence in between the miRNA-5p and miRNA-3p sequences) will be collectively referred to as miRNA backbone sequences. The term “5′ backbone sequence” will be used herein to refer to the backbone sequence that, in a pri-miRNA, is 5′ of the miRNA-5p sequence. The term “3′ backbone sequence” will be used herein to refer to the backbone sequence that, in a pri-miRNA, is 3′ of the miRNA-3p sequence. The term “stem loop sequence” refers to the backbone sequence that, in a pri-miRNA, is between the miRNA-5p and miRNA-3p sequences.

[0124] The pri-miRNA of the present invention may be produced from naturally-occurring pri-miRNAs by removing the native mature miRNA sequences and replacing them with non-native mature miRNA sequences wherein one of the sequences is capable of serving as a guide miRNA targeting a gene of interest. In the design of a non-naturally occurring pri-miRNA, backbone miRNA nucleic acid sequences can be derived from mouse, rat, or human miRNA sequences. As a non-limiting example, backbone miRNA sequences can be derived from miR150, miR206, miR204, miR17, miR16, miR30a, miR126, miR122, miR213, miR29b1 or miR133a1.

[0125] Examples of backbone sequences that may be used in the practice of the present invention include, but are not limited, to those encoded by the DNA sequences listed in Table 1 below. The symbols of “X” and “Y” in Table 1 indicate nucleic acid sequences encoding, respectively, the guide miRNA (which may be either miRNA-5p or miRNA-3p) and the passenger miRNA (which may be either miRNA-5p or miRNA-3p), whereas the symbol of “n” indicates the number of nucleotides in such sequences, for example 16-30, preferably 18-25. In some embodiments, n can be 6, 7, 8, 9, 10, 11, 12, 13, 14, 15, 16, 17, 18, 19, 20, 21, 22, 23, 24, 25, 26, 27, 28, 29, 30, 31, 32, 33, 34 or 35 nucleotides. In certain embodiments, the backbone miRNA sequences are those that are encoded by sequences that hybridize under stringent hybridization conditions with the complement of any one of the sequences listed in Table 1.

TABLE 1
Nucleic acids encoding miRNA backbone sequences

| | Nucleic acid sequences encoding |
|---|---|
| Synthetic | 5' Backbone Sequence Xₙ-Stem Loop |
| miRNA | Sequence Yₙ-3' Backbone Sequence |
| miR204 | SEQ ID NO: 1- [symbol] -SEQ ID NO: 2- [symbol] -SEQ ID NO: 3 |
| miR206 | SEQ ID NO: 4- [symbol] -SEQ ID NO: 5- [symbol] -SEQ ID NO: 6 |
| miR17 | SEQ ID NO: 7- [symbol] -SEQ ID NO: 8- [symbol] -SEQ ID NO: 9 |
| miR150 | SEQ ID NO: 10- [symbol] -SEQ ID NO: 11- [symbol] -SEQ ID NO: 12 |
| miR150 | SEQ ID NO: 13- [symbol] -SEQ ID NO: 14- [symbol] -SEQ ID NO: 15 |
| miR16 | SEQ ID NO: 16- [symbol] -SEQ ID NO: 17- [symbol] -SEQ ID NO: 18 |
| miR30a | SEQ ID NO: 19- [symbol] -SEQ ID |
| | NO: 20- [symbol] -SEQ ID NO: 21 |
| miR126 | SEQ ID NO: 22- [symbol] -SEQ ID NO: 23- [symbol] -SEQ ID NO: 24 |
| miR122 | SEQ ID NO: 25- [symbol] -SEQ ID NO: 26- [symbol] -SEQ ID NO: 27 |
| miR214 | SEQ ID NO: 28- [symbol] -SEQ ID NO: 29- [symbol] -SEQ ID NO: 30 |
| miR214 | SEQ ID NO: 31- [symbol] -SEQ ID NO: 32- [symbol] -SEQ ID NO: 33 |
| miR29b1 | SEQ ID NO: 34- [symbol] -SEQ ID NO: 35- [symbol] -SEQ ID NO: 36 |
| miR29b1 | SEQ ID NO: 37- [symbol] -SEQ ID NO: 38- [symbol] -SEQ ID NO: 39 |
| miR133a1 | SEQ ID NO: 40- [symbol] -SEQ ID NO: 41- [symbol] -SEQ ID NO: 42 |
| miR26a | SEQ ID NO: 43- [symbol] -SEQ ID NO: 44- [symbol] -SEQ ID NO: 45 |
| miR412 | SEQ ID NO: 46- [symbol] -SEQ ID NO: 47- [symbol] -SEQ ID NO: 48 |
| miR-19 | SEQ ID NO: 49- [symbol] -SEQ ID NO: 50- [symbol] -SEQ ID NO: 51 |
| miR-21 | SEQ ID NO: 52- [symbol] -SEQ ID NO: 53- [symbol] -SEQ ID NO: 54 |
| miR-142 | SEQ ID NO: 55- [symbol] -SEQ ID NO: 56- [symbol] -SEQ ID NO: 57 |
| miR-494 | SEQ ID NO: 58- [symbol] -SEQ ID NO: 59- [symbol] -SEQ ID NO: 60 |
| miR-1915 | SEQ ID NO: 61- [symbol] -SEQ ID NO: 62- [symbol] -SEQ ID NO: 63 |

[0126] While the miRNA-5p and miRNA-3p sequences hybridize with each other, they are not necessarily exactly complementary. In the design of a non-naturally occurring miRNA, compensatory mutations can be made in the miRNA-5p and/or miRNA-3p sequences so as to maintain the RNA folding and free energy of the native miRNA. In certain embodiments, the sequence encoding the miRNA-3p sequence has at least 50%, 60%, 70%, 80%, 85%, 90%, 95%, 96%, 97%, 98%, or 99% sequence identity with the complement to the sequence encoding the miRNA-5p sequence or is capable of hybridizing under stringent hybridization conditions with the sequence encoding the miRNA-5p sequence.

[0127] In certain embodiments, the target gene encodes a checkpoint inhibitor protein. Thus, the present invention relates in part to a polynucleotide encoding a non-naturally occurring miRNA that inhibits the expression of an immune checkpoint protein. In certain such embodiments, the target gene encodes CTLA4, PD-1, PD-L1, TIGIT, TIM3, LAG3, GITR, or PIK3IP1. Non-limiting examples of nucleic acid sequences encoding the guide miRNA targeting genes encoding such checkpoint inhibitors are listed in Table 2. Table 2 also lists the sequences encoding the passenger strand. As previous discussed, the guide and passenger strand are not necessarily complementary. It is contemplated that the passenger strand may also serve to target the messenger RNA associated with the target gene. It is also contemplated that sequences that sequences that hybridize under stringent hybridization conditions with the compliments of the sequences listed in Table 2 may also be used. The mature miRNA sequences used may be combined with a specific pri-miRNA backbone. Table 2 also lists backbones that can be combined with the mature guide and passenger miRNAs listed therein.

TABLE 2
Nucleic acid sequences encoding mature miRNA sequences

| | | | DNA encoding |
|---|---|---|---|
| miRNA | | DNA encoding | passenger |
| Target | Backbone | guide miRNA | miRNA |
| CTLA4 | miR-204 | (SEQ ID NO: 64) | (SEQ ID NO: 65) |
| CTLA4 | miR-26a | (SEQ ID NO: 66) | (SEQ ID NO: 67) |
| CTLA4 | miR-30a | (SEQ ID NO: 68) | (SEQ ID NO: 69) |
| CTLA4 | miR-206 | (SEQ ID NO: 70) | (SEQ ID NO: 71) |
| PD1 | miR-204 | (SEQ ID NO: 72) | (SEQ ID NO: 73) |
| PD1 | miR-204 | (SEQ ID NO: 704) | |
| PD1 | miR-204 | (SEQ ID NO: 705) | |
| PD1 | miR-204 | | (SEQ ID NO: 706) |
| PD1 | miR-204 | | (SEQ ID NO: 707) |
| PD1 | miR-204 | | (SEQ ID NO: 708) |
| PD1 | miR-206 | (SEQ ID NO: 74) | (SEQ ID NO: 75) |
| PD1 | miR-206 | (SEQ ID NO: 709) | |
| PD1 | miR-206 | (SEQ ID NO: 710) | |
| PD1 | miR-206 | | (SEQ ID NO: 711) |
| PD1 | miR-206 | | (SEQ ID NO: 712) |
| PD1 | miR-206 | | (SEQ ID NO: 713) |
| PD1 | miR-30a | (SEQ ID NO: 76) | (SEQ ID NO: 77) |
| PD1 | miR-412 | (SEQ ID NO: 78) | (SEQ ID NO: 79) |
| PD1 | miR122 | (SEQ ID NO: 80) | (SEQ ID NO: 81) |
| PD1 | miR-17 | (SEQ ID NO: 82) | (SEQ ID NO: 83) |
| PD1 | miR-150 | (SEQ ID NO: 74) | (SEQ ID NO: 85) |
| PD1 | miR-486 | (SEQ ID NO: 76) | (SEQ ID NO: 87) |
| TIGIT | miR-17 | (SEQ ID NO: 88) | (SEQ ID NO: 89) |
| TIGIT | miR-150 | (SEQ ID NO: 90) | (SEQ ID NO: 91) |
| TIGIT | miR-204 | (SEQ ID NO: 92) | (SEQ ID NO: 93) |
| TIGIT | miR29b1 | (SEQ ID NO: 94) | (SEQ ID NO: 95) |
| TIGIT | miR214 | (SEQ ID NO: 96) | (SEQ ID NO: 97) |
| TIGIT | miR-206 | (SEQ ID NO: 98) | (SEQ ID NO: 99) |
| TIGIT | miR-204 | (SEQ ID NO: 100) | (SEQ ID NO: 101) |
| TIGIT | miR-22 | (SEQ ID NO: 102) | (SEQ ID NO: 103) |
| TIGIT | miR-16 | (SEQ ID NO: 104) | (SEQ ID NO: 105) |
| TIGIT | miR-21 | (SEQ ID NO: 106) | (SEQ ID NO: 107) |
| TIGIT | miR-494 | (SEQ ID NO: 108) | (SEQ ID NO: 109) |
| TIGIT | miR-142 | (SEQ ID NO: 110) | (SEQ ID NO: 111) |
| TIGIT | miR-19 | (SEQ ID NO: 112) | (SEQ ID NO: 113) |
| TIGIT | miR-1915 | (SEQ ID NO: 114) | (SEQ ID NO: 115) |
| TIGIT | miR-206 | (SEQ ID NO: 116) | (SEQ ID NO: 117) |
| TIGIT | miR-204 | (SEQ ID NO: 118) | (SEQ ID NO: 119) |
| TIGIT | miR-22 | (SEQ ID NO: 120) | (SEQ ID NO: 121) |
| TIGIT | miR-142 | (SEQ ID NO: 122) | (SEQ ID NO: 123) |
| TIGIT | miR-16 | (SEQ ID NO: 124) | (SEQ ID NO: 125) |
| TIGIT | miR-206 | (SEQ ID NO: 126) | (SEQ ID NO: 127) |
| TIGIT | miR-204 | (SEQ ID NO: 128) | (SEQ ID NO: 129) |
| TIGIT | miR-21 | (SEQ ID NO: 130) | (SEQ ID NO: 131) |
| TIGIT | miR-494 | (SEQ ID NO: 132) | (SEQ ID NO: 133) |
| TIGIT | miR-19 | (SEQ ID NO: 134) | (SEQ ID NO: 135) |
| TIGIT | miR-1915 | (SEQ ID NO: 136) | (SEQ ID NO: 137) |
| TIGIT | miR-204 | (SEQ ID NO: 138) | (SEQ ID NO: 139) |
| TIGIT | miR-206 | (SEQ ID NO: 140) | (SEQ ID NO: 141) |
| TIGIT | miR-21 | (SEQ ID NO: 142) | (SEQ ID NO: 143) |
| TIGIT | miR-22 | (SEQ ID NO: 144) | (SEQ ID NO: 145) |
| TIM3 | miR204 | (SEQ ID NO: 146) | (SEQ ID NO: 147) |
| TIM3 | miR206 | (SEQ ID NO: 148) | (SEQ ID NO: 149) |
| TIM3 | miR17 | (SEQ ID NO: 150) | (SEQ ID NO: 151) |
| TIM3 | miR126 | (SEQ ID NO: 152) | (SEQ ID NO: 153) |
| TIM3 | miR122 | (SEQ ID NO: 154) | (SEQ ID NO: 155) |
| TIM3 | miR214 | (SEQ ID NO: 156) | (SEQ ID NO: 157) |
| LAG3 | miR-30a | (SEQ ID NO: 158) | (SEQ ID NO: 159) |
| LAG3 | miR122 | (SEQ ID NO: 160) | (SEQ ID NO: 161) |
| GITR | miR206 | (SEQ ID NO: 162) | (SEQ ID NO: 163) |
| GITR | miR29b1 | (SEQ ID NO: 164) | (SEQ ID NO: 165) |
| PIK3IP1 | miR206 | (SEQ ID NO: 166) | (SEQ ID NO: 167) |
| PIK3IP1 | miR126 | (SEQ ID NO: 168) | (SEQ ID NO: 169) |
| PIK3IP1 | miR30a | (SEQ ID NO: 170) | (SEQ ID NO: 171) |

[0128] In certain embodiments, the present invention relates to a polynucleotide comprising a nucleic acid sequence having at least 80% sequence identity with any one of SEQ ID NOs: 64-83, 85, 87-171, and 704-713 or that is capable of hybridizing under stringent hybridization conditions to the complement of any one of SEQ ID NOs: 64-83, 85, 87-171, and 704-713. In certain such embodiments, the present invention relates to a polynucleotide comprising a nucleic acid sequence having at least 80%, 85%, 90%, 95%, 96%, 97%, 98%, or 99% sequence identity with any one of SEQ ID NOs: 64, 66, 68, 70, 72, 74, 76, 78, 80, 82, 88, 90, 92, 94, 96, 98, 100, 102, 104, 106, 108, 110, 112, 114, 116, 118, 120, 122, 124, 126, 128, 130, 132, 134, 136, 138, 140, 142, 144, 146, 148, 150, 152, 154, 156, 158, 160, 162, 164, 166, 168, 170, 704, 705, 709, and 710 or that is capable of hybridizing under stringent hybridization conditions to the complement of any one of SEQ ID NOs: 64, 66, 68, 70, 72, 74, 76, 78, 80, 82, 88, 90, 92, 94, 96, 98, 100, 102, 104, 106, 108, 110, 112, 114, 116, 118, 120, 122, 124, 126, 128, 130, 132, 134, 136, 138, 140, 142, 144, 146, 148, 150, 152, 154, 156, 158, 160, 162, 164, 166, 168, 170, 704, 705, 709, and 710.

[0129] In certain embodiments, the miRNA targets PD-1. In certain such embodiments, the present invention relates to a polynucleotide comprising a nucleic acid sequence having at least 80%, 85%, 90%, 95%, 96%, 97%, 98%, or 99% sequence identity with any one of SEQ ID NOs: 72-83, 85, 87, and 704-713 or that is capable of hybridizing under stringent hybridization conditions to the complement of any one of SEQ ID NOs: 72-83, 85, 87, and 704-713. In certain embodiments, the present invention relates to a polynucleotide comprising a nucleic acid sequence having at least 80%, 85%, 90%, 95%, 96%, 97%, 98%, or 99% sequence identity with any one of SEQ ID NOs: 72, 74, 76, 78, 80, 82, 704, 705, 709, and 710 or that is capable of hybridizing under stringent hybridization conditions to the complement of any one of SEQ ID NOs: 72, 74, 76, 78, 80, 82, 704, 705, 709, and 710.

[0130] In certain embodiments, the present invention relates to a polynucleotide comprising a nucleic acid sequence having at least 80%, 85%, 90%, 95%, 96%, 97%, 98%, or 99% sequence identity with any one of SEQ ID NOs: 72-75 or that is capable of hybridizing under stringent hybridization conditions to the complement of any one of SEQ ID NOs: 72-75. In certain such embodiments, the present invention relates to a polynucleotide comprising a nucleic acid sequence having at least 80%, 85%, 90%, 95%, 96%, 97%, 98%, or 99% sequence identity with SEQ ID NO: 72 or 74 or that is capable of hybridizing under stringent hybridization conditions to the complement of SEQ ID NO: 72 or 74.

[0131] In certain embodiments, the present invention relates to a polynucleotide comprising:
[0132] a) a sequence encoding a 5′ miRNA backbone sequence;
[0133] b) a sequence encoding a guide miRNA sequence;
[0134] c) a sequence encoding a stem loop sequence;
[0135] d) a sequence encoding a passenger miRNA sequence; and
[0136] e) a sequence encoding a 3′ backbone sequence.

[0137] In certain embodiments, the sequence encoding the guide miRNA sequence has at least 80%, 85%, 90%, 95%, 96%, 97%, 98%, or 99% sequence identity with any one of SEQ ID NOs: 64, 66, 68, 70, 72, 74, 76, 78, 80, 82, 88, 90, 92, 94, 96, 98, 100, 102, 104, 106, 108, 110, 112, 114, 116, 118, 120, 122, 124, 126, 128, 130, 132, 134, 136, 138, 140, 142, 144, 146, 148, 150, 152, 154, 156, 158, 160, 162, 164, 166, 168, 170, 704, 705, 709, and 710; or is capable of hybridizing under stringent hybridization conditions to the complement of any one of such sequences.

[0138] In certain embodiments, the sequence encoding the passenger miRNA sequence has at least 80%, 85%, 90%, 95%, 96%, 97%, 98%, or 99% sequence identity to any one of SEQ ID NOs: 65, 67, 69, 71, 73, 75, 77, 79, 81, 83, 85, 87, 89, 91, 93, 95, 97, 99, 101, 103, 105, 107, 109, 111, 113, 115, 117, 119, 121, 123, 125, 127, 129, 131, 133, 135, 137, 139, 141, 143, 145, 147, 149, 151, 153, 155, 157, 159, 161, 163, 165, 167, 169, 171, 706-708, and 711-713; or is capable of hybridizing under stringent hybridization conditions to the complement of any one of such sequences.

[0139] In certain embodiments, the polynucleotide encoding a pri-miRNA encodes:
[0140] a) a guide miRNA sequence having at least 80%, 85%, 90%, 95%, 96%, 97%, 98%, or 99% sequence identity with any one of SEQ ID NOs: 64, 66, 68, 70, 72, 74, 76, 78, 80, 82, 88, 90, 92, 94, 96, 98, 100, 102, 104, 106, 108, 110, 112, 114, 116, 118, 120, 122, 124, 126, 128, 130, 132, 134, 136, 138, 140, 142, 144, 146, 148, 150, 152, 154, 156, 158, 160, 162, 164, 166, 168, 170, 704, 705, 709, and 710, or that is capable of hybridizing under stringent hybridization conditions to the complement of any one of such sequences; and
[0141] b) a passenger sequence having at least 80%, 85%, 90%, 95%, 96%, 97%, 98%, or 99% sequence identity to, respectively, any one of SEQ ID NOs: 65, 67, 69, 71, 73, 75, 77, 79, 81, 83, 85, 87, 89, 91, 93, 95, 97, 99, 101, 103, 105, 107, 109, 111, 113, 115, 117, 119, 121, 123, 125, 127, 129, 131, 133, 135, 137, 139, 141, 143, 145, 147, 149, 151, 153, 155, 157, 159, 161, 163, 165, 167, 169, 171, 706-708, and 711-713, or that is capable of hybridizing under stringent hybridization conditions to the complement of any one of such sequences.

[0142] In any of the foregoing embodiments, the sequences encoding the 5′ miRNA backbone sequence, the stem loop sequence, and the 3′ miRNA backbone sequence can each comprise:
[0143] SEQ ID NO: 1, SEQ ID NO: 2, and SEQ ID NO: 3, respectively;
[0144] SEQ ID NO: 4, SEQ ID NO: 5, and SEQ ID NO: 6, respectively;
[0145] SEQ ID NO: 7, SEQ ID NO: 8, and SEQ ID NO: 9, respectively;
[0146] SEQ ID NO: 10, SEQ ID NO: 11, and SEQ ID NO: 12, respectively;
[0147] SEQ ID NO: 13, SEQ ID NO: 14, and SEQ ID NO: 15, respectively;
[0148] SEQ ID NO: 16, SEQ ID NO: 17, and SEQ ID NO: 18, respectively;
[0149] SEQ ID NO: 19, SEQ ID NO: 20, and SEQ ID NO: 21, respectively;
[0150] SEQ ID NO: 22, SEQ ID NO: 23, and SEQ ID NO: 24, respectively;
[0151] SEQ ID NO: 25, SEQ ID NO: 26, and SEQ ID NO: 27, respectively;
[0152] SEQ ID NO: 28, SEQ ID NO: 29, and SEQ ID NO: 30, respectively;
[0153] SEQ ID NO: 31, SEQ ID NO: 32, and SEQ ID NO: 33, respectively;
[0154] SEQ ID NO: 34, SEQ ID NO: 35, and SEQ ID NO: 36, respectively;
[0155] SEQ ID NO: 37, SEQ ID NO: 38, and SEQ ID NO: 39, respectively;
[0156] SEQ ID NO: 40, SEQ ID NO: 41, and SEQ ID NO: 42, respectively;
[0157] SEQ ID NO: 43, SEQ ID NO: 44, and SEQ ID NO: 45, respectively;
[0158] SEQ ID NO: 46, SEQ ID NO: 47, and SEQ ID NO: 48, respectively;
[0159] SEQ ID NO: 49, SEQ ID NO: 50, and SEQ ID NO: 51, respectively;
[0160] SEQ ID NO: 52, SEQ ID NO: 53, and SEQ ID NO: 54, respectively;
[0161] SEQ ID NO: 55, SEQ ID NO: 56, and SEQ ID NO: 57, respectively;
[0162] SEQ ID NO: 58, SEQ ID NO: 59, and SEQ ID NO: 60, respectively; or
[0163] SEQ ID NO: 61, SEQ ID NO: 62, and SEQ ID NO: 63, respectively;
   or sequences having at least 80%, 85%, 90%, 95%, 96%, 97%, 98%, or 99% sequence identity with such sequences, or that are capable of hybridizing under stringent hybridization conditions to the complements of such sequences.

[0164] Nucleic acids encoding exemplary non-naturally occurring pri-miRNA sequences targeting specific checkpoint inhibitors are described in Table 3. In certain embodiments, the non-naturally occurring pri-miRNA sequence may be a sequence that is capable of hybridizing under stringent hybridization conditions with the complement of any one of the sequences listed in Table 3.

TABLE 3
Nucleic acid sequences encoding non-naturally
occurring pri-miRNA sequences

| miRNA | Encoded pri- | |
|---|---|---|
| Target | miRNA(s) | DNA Sequence |
| CTLA4 | miR204 | (SEQ ID NO: 178) |
| PD1 | miR204 | (SEQ ID NO: 179) |
| PD1 | miR206 | (SEQ ID NO: 180) |
| TIGIT | miR17 | (SEQ ID NO: 181) |
| TIGIT | miR150 | (SEQ ID NO: 182) |
| TIGIT | miR204 | (SEQ ID NO: 183) |
| TIGIT | miR-206 | (SEQ ID NO: 184) |
| TIGIT | miR-204 | (SEQ ID NO: 185) |
| TIGIT | miR-22 | (SEQ ID NO: 186) |
| TIGIT | miR-16 | (SEQ ID NO: 187) |
| TIGIT | miR-16 | (SEQ ID NO: 188) |
| TIGIT | miR-21 | (SEQ ID NO: 189) |
| TIGIT | miR-494 | (SEQ ID NO: 190) |
| TIGIT | miR-142 | (SEQ ID NO: 191) |
| TIGIT | miR-19 | (SEQ ID NO: 192) |
| TIGIT | miR-1915 | (SEQ ID NO: 193) |
| TIGIT | miR-206 | (SEQ ID NO: 194) |
| TIGIT | miR-204 | (SEQ ID NO: 195) |
| TIGIT | miR-22 | (SEQ ID NO: 196) |
| TIGIT | miR-142 | (SEQ ID NO: 197) |
| TIGIT | miR-16 | (SEQ ID NO: 198) |
| TIGIT | miR-206 | (SEQ ID NO: 199) |
| TIGIT | miR-204 | (SEQ ID NO: 200) |
| TIGIT | miR-21 | (SEQ ID NO: 201) |
| TIGIT | miR-494 | (SEQ ID NO: 202) |
| TIGIT | miR-19 | (SEQ ID NO: 203) |
| TIGIT | miR-1915 | (SEQ ID NO: 204) |
| TIGIT | miR-204 | (SEQ ID NO: 205) |
| TIGIT | miR-206 | (SEQ ID NO: 206) |
| TIGIT | miR-21 | (SEQ ID NO: 207) |
| TIGIT | miR-22 | (SEQ ID NO: 208) |
| TIM3 | miR204 | (SEQ ID NO: 209) |
| TIM3 | miR150 | (SEQ ID NO: 210) |
| TIM3 | miR30a | (SEQ ID NO: 211) |
| TIM3 | miR206 | (SEQ ID NO: 212) |
| TIM3 | miR16 | (SEQ ID NO: 213) |
| TIM3 | miR17 | (SEQ ID NO: 214) |
| TIM3 | miR126 | (SEQ ID NO: 215) |
| TIM3 | miR122 | (SEQ ID NO: 216) |
| TIM3 | miR214 | (SEQ ID NO: 217) |
| TIM3 | miR29b1 | (SEQ ID NO: 218) |
| TIM3 | miR204 | (SEQ ID NO: 219) |
| TIM3 | miR133a1 | (SEQ ID NO: 220) |
| LAG3 | miR30a | (SEQ ID NO: 221) |
| LAG3 | miR206 | (SEQ ID NO: 222) |
| LAG3 | miR204 | (SEQ ID NO: 223) |
| LAG3 | miR150 | (SEQ ID NO: 224) |
| LAG3 | miR17 | (SEQ ID NO: 225) |
| LAG3 | miR122 | (SEQ ID NO: 226) |
| LAG3 | miR126 | (SEQ ID NO: 227) |
| GITR | miR30a | (SEQ ID NO: 228) |
| GITR | miR206 | (SEQ ID NO: 229) |
| GITR | miR17 | (SEQ ID NO: 230) |
| GITR | miR122 | (SEQ ID NO: 231) |
| GITR | miR150 | (SEQ ID NO: 232) |
| GITR | miR29 | (SEQ ID NO: 233) |
| GITR | miR181a1 | (SEQ ID NO: 234) |
| TIGIT | miR206 | (SEQ ID NO: 235) |
| TIGIT | miR30a | (SEQ ID NO: 236) |
| TIGIT | miR133a1 | (SEQ ID NO: 237) |
| TIGIT | miR122 | (SEQ ID NO: 238) |
| TIGIT | miR29b1 | (SEQ ID NO: 239) |
| TIGIT | miR214 | (SEQ ID NO: 240) |
| PD1 | miR30a | (SEQ ID NO: 241) |
| PD1 | miR412 | (SEQ ID NO: 242) |
| PD1 | miR17 | (SEQ ID NO: 243) |
| PD1 | miR122 | (SEQ ID NO: 244) |
| PD1 | miR150 | (SEQ ID NO: 245) |
| PD1 | miR486 | (SEQ ID NO: 246) |
| PD1 | miR206 | (SEQ ID NO: 247) |
| PD1 | miR122 | (SEQ ID NO: 248) |
| PD1 | miR30a | (SEQ ID NO: 249) |
| CTLA4 | miR206 | (SEQ ID NO: 250) |
| CTLA4 | miR26a | (SEQ ID NO: 251) |
| CTLA4 | miR30a | (SEQ ID NO: 252) |
| PIK3IP1 | miR206 | (SEQ ID NO: 253) |
| PIK3IP1 | miR126 | (SEQ ID NO: 254) |
| PIK3IP1 | miR30a | (SEQ ID NO: 255) |
| TCRa3′UTR | miR150 | (SEQ ID NO: 256) |
| TCRa3′UTR | miR204 | (SEQ ID NO: 257) |
| TCRa3′UTR | miR206 | (SEQ ID NO: 258) |
| TCRa3′UTR | miR26a | (SEQ ID NO: 259) |
| TCRa3′UTR | miR150 | (SEQ ID NO: 260) |
| TCRa3′UTR | miR16 | (SEQ ID NO: 261) |
| TCRa3′UTR | miR206 | (SEQ ID NO: 262) |
| TCRa3′UTR | miR26a | (SEQ ID NO: 263) |

[0165] In certain such embodiments, the present invention relates to a polynucleotide comprising a nucleic acid sequence having at least 80%, 85%, 90%, 95%, 96%, 97%, 98%, or 99% sequence identity with any one of SEQ ID NOs: 178-263 or that is capable of hybridizing under stringent hybridization conditions to the complement of any one of SEQ ID NOs: 178-263.

[0166] In certain embodiments, the miRNA targets PD-1. In certain such embodiments, the present invention relates to a polynucleotide comprising a nucleic acid sequence having at least 80%, 85%, 90%, 95%, 96%, 97%, 98%, or 99% sequence identity with any one of SEQ ID NOs: 179, 180, and 241-249 or that is capable of hybridizing under stringent hybridization conditions to the complement of any one of SEQ ID NOs: 179, 180, and 241-249. In certain embodiments, the present invention relates to a polynucleotide comprising a nucleic acid sequence having at least 80%, 85%, 90%, 95%, 96%, 97%, 98%, or 99% sequence identity with any one of SEQ ID NO: 179 or 180 or that is capable of hybridizing under stringent hybridization conditions to the complement of any one of SEQ ID NOs: 179 or 180.

[0167] Certain embodiments of the present relate to a polynucleotide that comprises nucleic acid sequences encoding at least two pri-miRNAs. The two or more pri-miRNAs may contain guide miRNA sequences that target the same target gene or the various guide miRNAs may target different genes. In the case of multiple pri-miRNAs, each design may be based on a different native miRNA backbone to reduce the likelihood of misfolding of one miRNA with another. Table 4 provides examples of nucleic acid sequences encoding one or more pri-miRNAs.

TABLE 4
Non-naturally occurring miRNA sequences
comprising two or more pri-miRNAs

| miRNA | miRNA | |
|---|---|---|
| Target | backbone | DNA Sequence |
| PD1 | miR204 + | (SEQ ID NO: 267) |
| | miR206 | |
| PD1 + | miR204 + | (SEQ ID NO: 268) |
| TIGIT | miR150 | |
| PD1 + | miR206 + | (SEQ ID NO: 269) |
| TIGIT | miR150 | |
| TIGIT + | miR17 + | (SEQ ID NO: 270) |
| PD1 | miR204 | |
| TIGIT + | miR17 + | (SEQ ID NO: 271) |
| PD1 | miR206 | |
| TIGIT + | miR204 + | (SEQ ID NO: 272) |
| PD1 | miR206 | |
| TIGIT + | miR150 + | (SEQ ID NO: 273) |
| PD1 | miR204 | |
| TIGIT + | miR150 + | (SEQ ID NO: 274) |
| PD1 | miR206 | |
| TIGIT + | miR17 + | (SEQ ID NO: 275) |
| PD1 + | miR204 + | |
| PD1 | miR206 | |
| TIGIT + | miR17 + | (SEQ ID NO: 276) |
| PD1 + | miR204 + | |
| PD1 | miR206 extra | |
| | spacing 1 | |
| TIGIT + | miR17 + | (SEQ ID NO: 277) |
| PD1 + | miR204 + | |
| PD1 | miR206 extra | |
| | spacing 2 | |
| PD1 + PD1 + | miR204 + | (SEQ ID NO: 278) |
| TIGIT | miR206 + | |
| | miR17 | |
| PD1 + PD1 + | miR204 + | (SEQ ID NO: 279) |
| TIGIT | miR206 + | |
| | miR17 extra | |
| | spacing 1 | |
| PD1 + PD1 + | miR204 + | (SEQ ID NO: 280) |
| TIGIT | miR206 + | |
| | miR17 extra | |
| | spacing 2 | |
| PD1 + | miR204 + | (SEQ ID NO: 281) |
| CTLA4 | miR26a | |
| PD1 + | miR204 + | (SEQ ID NO: 282) |
| PD1 | miR206 | |
| PD1 + | miR206 + | (SEQ ID NO: 283) |
| CTLA4 | miR26a | |
| PD1 + | miR206 + | (SEQ ID NO: 284) |
| CTLA4 | miR204 | |
| TIGIT + | miR17 + | (SEQ ID NO: 285) |
| CTLA4 | miR26a | |
| TIGIT + | miR17 + | (SEQ ID NO: 286) |
| CTLA4 | miR204 | |
| TIGIT + | miR17 + | (SEQ ID NO: 287) |
| PD1 | miR204 | |
| TIGIT + | miR17 + | (SEQ ID NO: 288) |
| PD1 | 206 | |
| TIGIT + | miR204 + | (SEQ ID NO: 289) |
| CTLA4 | miR26a | |
| TIGIT + | miR204 + | (SEQ ID NO: 290) |
| PD1 | miR206 | |

[0168] In certain such embodiments, the present invention relates to a polynucleotide comprising a nucleic acid sequence having at least 80%, 85%, 90%, 95%, 96%, 97%, 98%, or 99% sequence identity with any one of SEQ ID NOs: 267-290 or that is capable of hybridizing under stringent hybridization conditions to the complement of any one of SEQ ID NOs: 267-290.

[0169] In certain such embodiments, the pri-miRNA comprises at least two pre-miRNAs that target PD-1. In certain embodiments, the present invention relates to a polynucleotide comprising a nucleic acid sequence having at least 80%, 85%, 90%, 95%, 96%, 97%, 98%, or 99% sequence identity with any one of SEQ ID NO: 267 or that is capable of hybridizing under stringent hybridization conditions to the complement of any one of SEQ ID NOs: 267.

[0170] In certain embodiments, the nucleic acid encoding the pri-miRNA(s) is contained in the same genetic construct as that comprising one or more genes encoding protein(s) of interest (e.g., a chimeric antigen receptor, a cytokine, or a cell tag). In certain embodiments, such a genetic construct includes a nucleic acid sequence encoding a 5′ untranslated region (5′UTR) directly upstream of the gene(s) of interest and the sequence encoding the miRNA is included in the 5′UTR. In certain embodiments, such a genetic construct includes a nucleic acid sequence encoding a 3′ untranslated region (3′UTR) directly downstream of the gene(s) of interest and the sequence encoding the miRNA is included in the 3′UTR.

[0171] In embodiments wherein the sequence encoding the pri-miRNA is included in the sequence corresponding to the 5′ UTR, the transcribed RNA can include additional sequences such as splice donor, branchpoint and/or acceptor site sequences. The inclusion of splice donor, branchpoint, and acceptor sites is important for splicing of the miRNAs from the transcribed RNA. Without splicing, the highly structured miRNA sequence is likely to impede ribosome scanning to the translation initiation sequence relating to the gene of interest. Examples of sequences encoding such splice donor/acceptor sites include SEQ ID NOs: 291 and 292, sequences having at least 80%, 85%, 90%, 95%, 96%, 97%, 98%, or 99% sequence identity with such sequences and sequences that are capable of hybridizing with the complement of such sequences under stringent hybridization conditions.

[0172] Thus, in certain embodiments, the polynucleotide of the present invention further comprises: a) a nucleic acid sequence having at least 80% sequence identity with SEQ ID NO: 291 or that is capable of hybridizing under stringent hybridization conditions to the complement of SEQ ID NO: 291; and b) a nucleic acid sequence having at least 80% sequence identity with SEQ ID NO: 292 or that is capable of hybridizing under stringent hybridization conditions to the complement of SEQ ID NO: 292.

### IV. Chimeric Antigen Receptors (CARs)

[0173] In any of the foregoing embodiments, a polynucleotide of the present disclosure can further encode a chimeric receptor, such as a chimeric antigen receptor (CAR). Thus, a polynucleotide of the present disclosure can encode miRNA(s) and a CAR as described herein. In any of the embodiments of the present disclosure, a modified immune effector cell can comprise a chimeric receptor as described herein.

[0174] A CAR is an engineered receptor that grafts an exogenous specificity onto an immune effector cell. In some instances, a CAR comprises an extracellular domain (ectodomain) that comprises an antigen-binding domain, a transmembrane domain, and an intracellular (endodomain) domain. The intracellular domain comprises an intracellular signaling domain. In certain embodiments, the extracellular domain further comprises a spacer between the antigen-binding domain and the transmembrane domain.

[0175] A. Antigen-Binding Domain

[0176] An antigen-binding domain can comprise complementary determining regions of a monoclonal antibody and/or antigen binding fragments thereof. A complementarity determining region (CDR) is a short amino acid sequence found in the variable domains of antigen receptor (e.g., immunoglobulin and T-cell receptor) proteins that bind an antigen and therefore provides the receptor with its specificity for that particular antigen. Each polypeptide chain of an antigen receptor can contain three CDRs (CDR1, CDR2, and CDR3).

[0177] In certain embodiments, the antigen-binding domain comprises an antibody, or functional fragment or variant thereof, that binds to a target antigen. The functional fragment or variant may comprise the variable domain of the heavy chain of an antibody (V_{H}) and/or the variable domain of the light chain of an antibody (V_{L}), or functional fragments or variants thereof. In certain embodiments, the antigen-binding domain comprises a Fv, Fab, Fab2, Fab′, F(ab′)2, or F(ab′) 3 fragment of an antibody. In certain embodiments, the antigen-binding domain comprises a scFv, sc(Fv)₂, a dsFv, a diabody, a minibody, a nanobody, or binding fragments thereof. In certain embodiments, the antigen-binding domain further comprises an F_{c} fragment of an antibody, for example it may comprise an scFv linked with an F_{c} fragment.

[0178] In some embodiments, the CAR targets an antigen that is elevated in cancer cells, in autoimmune cells, or in cells that are infected by a virus, bacteria or parasite. Pathogens that may be targeted include, without limitation, Plasmodium, trypanosome, Aspergillus, Candida, Hepatitis A, Hepatitis B, Hepatitis C, HSV, HPV, RSV, EBV, CMV, JC virus, BK virus, or Ebola pathogens. Autoimmune diseases can include graft-versus-host disease, rheumatoid arthritis, lupus, celiac disease, Crohn's disease, Sjogren Syndrome, polymyalgia rheumatic, multiple sclerosis, neuromyelitis optica, ankylosing spondylitis, Type 1 diabetes, alopecia areata, vasculitis, temporal arteritis, bullous pemphigoid, psoriasis, pemphigus vulgaris, and autoimmune uveitis.

[0179] The pathogen recognized by a CAR may be essentially any kind of pathogen, but in some embodiments, the pathogen is a fungus, bacteria, or virus. Exemplary viral pathogens include those of the families of Adenoviridae, Epstein-Barr virus (EBV), Cytomegalovirus (CMV), Respiratory Syncytial Virus (RSV), JC virus, BK virus, HPV, HSV, HHV family of viruses, Hepatitis family of viruses, Picornaviridae, Herpesviridae, Hepadnaviridae, Flaviviridae, Retroviridae,

[0180] Orthomyxoviridae, Paramyxoviridae, Papovaviridae, Polyomavirus, Rhabdoviridae, and Togaviridae. Exemplary pathogenic viruses cause smallpox, influenza, mumps, measles, chickenpox, ebola, and rubella. Exemplary pathogenic fungi include Candida, Aspergillus, Cryptococcus, Histoplasma, Pneumocystis, and Stachybotrys. Exemplary pathogenic bacteria include Streptococcus, Pseudomonas, Shigella, Campylobacter, Staphylococcus, Helicobacter, E. coli, Rickettsia, Bacillus, Bordetella, Chlamydia, Spirochetes, and Salmonella. In some embodiments, the pathogen receptor Dectin-1 may be used to generate a CAR that recognizes the carbohydrate structure on the cell wall of fungi such as Aspergillus. In another embodiment, CARs can be made based on an antibody recognizing viral determinants (e.g., the glycoproteins from CMV and Ebola) to interrupt viral infections and pathology.

[0181] In some embodiments, a CAR described herein comprises an antigen-binding domain that binds to an epitope on B7H4, BCMA, BTLA, CAIX, CA125, CCR4, CD3, CD4, CD5, CD7, CD16, CD19, CD20, CD22, CD24, CD25, CD28, CD30, CD33, CD38, CD40, CD44, CD44v6, CD44v7/v8, CD47, CD52, CD56, CD70, CD79b, CD80, CD81, CD86, CD123, CD133, CD137, CD138, CD151, CD171, CD174, CD276, CEA, CEACAM6, CLL-1, c-MET, CS1, CSPG4, CTLA-4, DLL3, EDB-F, EGFR, EGFR2, EGFRvIII, EGP-2, EGP-40, EphA2, FAP, FLT1, FLT4, Folate-binding Protein, Folate Receptor, Folate receptor α, α-Folate receptor, Frizzled, GD2, GD3, GHR, GHRHR, GITR, GPC3, Gp100, gp130, HBV antigens, HER1, HER2, HER3, HER4, HER1/HER3, h5T4, HPV antigens, HVEM, IGF1R, IgKAppa, IL-1-RAP, IL-2R, IL6R, IL-11Rα, IL-13R-a2, KDR, KRASG12V, LewisA, LewisY, L1-CAM, LIFRP, LRP5, LTPR, MAGE-A, MAGE-A1, MAGE-A10, MAGE-A3, MAGEA3/A6, MAGE-A4, MAGE-A6, MART-1, MCAM, mesothelin, PSCA, Mucins such as MUC1, MUC-4 or MUC16, NGFR, NKG2D, Notch-1-4, NY-ESO-1, O-acetylGD2, O-acetylGD3, OX40, P53, PD1, PDE10A, PD-L1, PD-L2, PMSA, PRAME, PSCA, PSMA, PTCH1, RANK, Robol, ROR1, ROR1R, ROR-2, TACI, TAG-72, TCRα, TCRp, TGF, TGFBeta, TGFBeta-II, TGFBR1, TGFBR2, Titin, TLR7, TLR9, TNFR1, TNFR2, TNFRSF4, TRBC1, TWEAK-R, VEGF, VEGF-R2, or WT-1.

[0182] In some embodiments, a CAR described herein comprises an antigen-binding domain that binds to an epitope on CD19, CD33, MUC1, MUC16, or ROR1. In some instances, a CAR described herein comprises an antigen-binding domain that binds to an epitope on CD19. In some cases, a CAR described herein comprises an antigen-binding domain that binds to an epitope on CD33. In some instances, a CAR described herein comprises an antigen-binding domain that binds to an epitope on MUC1. In some instances, a CAR described herein comprises an antigen-binding domain that binds to an epitope on MUC16. In some instances, a CAR described herein comprises an antigen-binding domain that binds to an epitope on ROR1. In further embodiments, a CAR described herein comprises an autoantigen or an antigen binding domain that binds to an epitope on HLA-A2, myelin oligodendrocyte glycoprotein (MOG), factor VIII (FVIII), MAdCAM1, SDF1, or collagen type II.

[0183] Antigen binding can be assessed by flow cytometry or a cell based assay or any other equivalent assay. Cell based assays may utilize a cell type expressing antigen of interest on the surface to assess antigen-binding. An antigen or a fragment thereof expressed as a soluble protein can be utilized to assess antigen-binding using flow cytometry or similar assay. Improvements in antigen-binding may be indirectly assessed by functional measurement of antigen-binding domain or a chimeric receptor. For example, improved antigen-binding of a chimeric receptor or a CAR, as described herein, can be measured by increased specific cytotoxicity against target cells expressing the antigen.

[0184] Cell surface expression level of a polypeptide of the present disclosure can be assessed, for example, using a flow cytometry based assay. Improved expression of an antigen-binding polypeptide can be measured as percentage of analyzed cells expressing said antigen-binding polypeptide or alternatively as average density of said antigen-binding polypeptide on the surface of a cell. Additional suitable methods that can be used for assessing cell surface expression of the antigen-binding polypeptides described herein include western blotting or any other equivalent assay.

[0185] 1. CD19-specific Antigen-Binding Domain

[0186] CD19 is a cell surface glycoprotein of the immunoglobulin superfamily and is found predominately in malignant B-lineage cells. In some instances, CD19 has also been detected in solid tumors such as pancreatic cancer, liver cancer, and prostate cancer.

[0187] In some embodiments, the CAR comprises a CD19-specific antigen-binding domain, in which the antigen-binding domain comprises a F(ab′)2, Fab′, Fab, Fv, or scFv. In some embodiments, the antigen-binding domain recognizes an epitope on CD19 that is also recognized by FMC63. In some embodiments the scFv and/or VH/VL domains is/are derived from FMC63. FMC63 generally refers to a mouse monoclonal IgG1 antibody raised against Nalm-1 and -16 cells expressing CD19 of human origin (Ling, N. R., el al. (1987). Leucocyte typing III. 302).

[0188] In some embodiments, the antigen-binding domain recognizes an epitope on CD19 that is also recognized by JCAR014, JCAR015, JCAR017, or 19-28z CAR (Juno Therapeutics).

[0189] In some embodiments, the antigen-binding domain comprises a scFv antigen-binding domain that recognizes an epitope on CD19 that is also recognized by JCAR014, JCAR015, JCAR017, or 19-28z CAR (Juno Therapeutics).

[0190] In some embodiments, the antigen-binding domain comprises an anti-CD19 antibody described in U.S. Patent Application Publication No. 2016/0152723. In some embodiments, the antigen-binding domain comprises an anti-CD19 antibody described in International Patent Application Publication No. WO2015/123642. In some embodiments, the antigen-binding domain comprises an anti-CD19 scFv derived from clone FMC63 (Nicholson et al., Construction and characterization of a functional CD19 specific single chain Fv fragment for immunotherapy of B lineage leukemia and lymphoma., Mol. Immunol. 34:1157-1165 (1997)).

[0191] In some embodiments, the antigen-binding domain recognizes an epitope on CD19 that is also recognized by KTE-C19 (Kite Pharma, Inc.).

[0192] In some embodiments, the antigen-binding domain comprises a scFv antigen-binding domain, and the antigen-binding domain recognizes an epitope on CD19 that is also recognized by KTE-C19.

[0193] In some embodiments, the antigen-binding domain comprises an anti-CD19 antibody described in International Patent Application Publication No. WO2015/187528 or fragment or variant thereof.

[0194] In some embodiments, the antigen-binding domain recognizes an epitope on CD19 that is also recognized by CTL019 (Novartis).

[0195] In some embodiments, the antigen-binding domain comprises a scFv antigen-binding domain, and the antigen-binding domain recognizes an epitope on CD19 that is also recognized by CTL019.

[0196] In some embodiments, the antigen-binding domain recognizes an epitope on CD19 that is also recognized by UCART19 (Cellectis).

[0197] In some embodiments, the antigen-binding domain comprises a scFv antigen-binding domain, and the antigen-binding domain recognizes an epitope on CD19 that is also recognized by UCART19.

[0198] In some embodiments, the antigen-binding domain recognizes an epitope on CD19 that is also recognized by BPX-401 (Bellicum).

[0199] In some embodiments, the antigen-binding domain comprises a scFv antigen-binding domain, and the antigen-binding domain recognizes an epitope on CD19 that is also recognized by BPX-401.

[0200] In some cases, the antigen-binding domain recognizes an epitope on CD19 that is also recognized by blinatumomab (Amgen), coltuximabravtansine (ImmunoGen Inc./Sanofi-aventis), MOR208 (Morphosys AG/Xencor Inc.), MEDI-551 (Medimmune), denintuzumabmafodotin (Seattle Genetics), B4 (or DI-B4) (Merck Serono), taplitumomabpaptox (National Cancer Institute), XmAb 5871 (Amgen/Xencor, Inc.), MDX-1342 (Medarex) or AFM11 (Affimed).
[0201] In some embodiments, the antigen-binding domain comprises a F(ab′) 2, Fab′, Fab, Fv, or scFv, and the antigen-binding domain recognizes an epitope on CD19 that is also recognized by blinatumomab (Amgen), coltuximabravtansine (ImmunoGen Inc./Sanofi-aventis), MOR208 (Morphosys AG/Xencor Inc.), MEDI-551 (Medimmune), denintuzumabmafodotin (Seattle Genetics), B4 (or DI-B4) (Merck Serono), taplitumomabpaptox (National Cancer Institute), XmAb 5871 (Amgen/Xencor, Inc.), MDX-1342 (Medarex) or AFM11 (Affimed).

[0202] In some cases, the antigen-binding domain comprises a scFv antigen-binding domain, and the antigen-binding domain recognizes an epitope on CD19 that is also recognized by FMC63, blinatumomab (Amgen), coltuximabravtansine (ImmunoGen Inc./Sanofi-aventis), MOR208 (Morphosys AG/Xencor Inc.), MEDI-551 (Medimmune), denintuzumabmafodotin (Seattle Genetics), B4 (or DI-B4) (Merck Serono), taplitumomabpaptox (National Cancer Institute), XmAb 5871 (Amgen/Xencor, Inc.), MDX-1342 (Medarex) or AFM11 (Affimed).

[0203] 2. CD33-specific Antigen-Binding Domain

[0204] “CD33,” is a 67 kDa single pass transmembrane glycoprotein and is a member of the sialic acid-binding immunoglobulin-like lectins (Siglecs) super-family. CD33 is characterized by a V-set Ig-like domain responsible for sialic acid binding and a C2-set Ig-like domain in its extracellular domain. CD33 is expressed in myeloid lineage cells and has also been detected in lymphoid cells. Alternative splicing of CD33 mRNA leads to a shorter isoform (CD33m) lacking the V-set Ig-like domain as well as the disulfide bond linking the V- and C2-set Ig-like domains. In healthy subjects, CD33 is primarily expressed as a myeloid differentiation antigen found on normal multipotent myeloid precursors, unipotent colony-forming cells, monocytes and maturing granulocytes. CD33 is expressed on more than 80% of myeloid leukemia cells but not on normal hematopoietic stem cells or mature granulocytes. (Andrews, R. et al., The L4F3 antigen is expressed by unipotent and multipotent colony-forming cells but not by their precursors, Blood, 68(5):1030-5 (1986)). CD33 has been reported to be expressed on malignant myeloid cells, activated T cells and activated NK cells and is found on at least a subset of blasts in the vast majority of AML patients (Pollard, J. et al., Correlation of CD33 expression level with disease characteristics and response to gemtuzumab ozogamicin containing chemotherapy in childhood AML, Blood, 119(16):3705-11(2012)). In addition to broad expression on AML blasts, CD33 may be expressed on stem cells underlying AML.

[0205] In some embodiments, the antigen-binding domain of a CAR described herein is specific to CD33 (CD33 CAR). The CD33-specific CAR, when expressed on the cell surface, redirects the specificity of T cells to human CD33. In some embodiments, the antigen-binding domain comprises a single chain antibody fragment (scFv) comprising a variable domain light chain (VL) and variable domain heavy chain (VH) of a target antigen specific monoclonal anti-CD33 antibody joined by a flexible linker, such as a glycine-serine linker or a Whitlow linker. In some embodiments, the scFv is M195, m2H12, DRB2, and/or My9-6. In some embodiments, the scFv is humanized, for example, hM195. In some embodiments, the antigen-binding domain may comprise VH and VL that are directionally linked, for example, from N to C terminus, VH-linker-VL or VL-linker-VH. In some embodiments, the antigen-binding domain comprises a F(ab′)2, Fab′, Fab, Fv, or scFv that binds CD33. In some embodiments, the antigen-binding region recognizes an epitope on CD33 that is also recognized by Lintuzumab (Seattle Genetics), BI 836858 (Boehringer Ingelheim).

[0206] In some embodiments, a CAR described herein comprises an antigen-binding domain comprising a VL polypeptide.

[0207] In certain embodiments, the antigen-binding domain comprises a VL domain comprising the amino acid sequence of SEQ ID NO: 293 (hM195 VL domain), SEQ ID NO: 296 (M2H12 VL domain), SEQ ID NO: 298 (DRB2 VL domain), SEQ ID NO: 300 (My9-6 VL domain) or a functional fragment or variant thereof. In certain embodiments, the functional fragment is shorter than any one of the aforementioned sequences by at most 30, 25, 20, 15, 10, 9, 8, 7, 6, 5, 4, 3, 2, or 1 amino acid residues at the N- and/or C-terminus. In certain embodiments, the functional variant has at least 80%, 85%, 90%, 95%, 96%, 97%, 98%, or 99% sequence identity with the amino acid sequence of any one of SEQ ID NOs: 293, 296, 298, and 300, and/or is a conservatively-substituted variant of any one of such sequences.

[0208] In certain embodiments, the antigen-binding domain comprises a VL domain encoded by SEQ ID NO: 301 (nucleic acid encoding the VL domain for hM195). In certain embodiments, the functional variant has at least 80%, 85%, 90%, 95%, 96%, 97%, 98%, or 99% sequence identity with SEQ ID NO: 301; hybridizes under stringent hybridization conditions with the complement of the nucleic acid sequence of SEQ ID NO: 301; or is a codon degenerate variant of SEQ ID NO: 301.

[0209] In some embodiments, a CAR described herein comprises an antigen-binding domain comprising a VH polypeptide.

[0210] In certain embodiments, the antigen-binding domain comprises a VH domain comprising the amino acid sequence of SEQ ID NO: 294 (hM195 VH domain), SEQ ID NO: 295 (M2H12 VH domain), SEQ ID NO: 297 (DRB2 VH domain), SEQ ID NO: 299 (My9-6 VH domain) or a functional fragment or variant thereof. In certain embodiments, the functional fragment is shorter than any one of the aforementioned sequences by at most 30, 25, 20, 15, 10, 9, 8, 7, 6, 5, 4, 3, 2, or 1 amino acid residues at the N- and/or C-terminus. In certain embodiments, the functional variant has at least 80%, 85%, 90%, 95%, 96%, 97%, 98%, or 99% sequence identity with the amino acid sequence of any one of SEQ ID NOs: 294, 295, 297, or 299, and/or is a conservatively-substituted variant of the amino acid sequence of any one of SEQ ID NOs: 294, 295, 297, or 299.

[0211] In certain embodiments, the antigen-binding domain comprises a VH domain encoded by SEQ ID NO: 302 (nucleic acid encoding the VH domain for hM195), or a functional fragment or variant thereof. In certain embodiments, the functional variant has at least 80%, 85%, 90%, 95%, 96%, 97%, 98%, or 99% sequence identity with SEQ ID NO: 302; hybridizes under stringent hybridization conditions with the complement of the nucleic acid sequence of SEQ ID NO: 302; or is a codon degenerate variant of SEQ ID NO: 302.

[0212] In some embodiments, the antigen-binding domain can comprise VH and VL that are directionally linked, for example, from N to C terminus, VH-linker-VL or VL-linker-VH. Any linker as described herein can be used to link the VH and VL domains.

[0213] In certain embodiments, the antigen-binding domain comprises scFv. In certain such embodiments, the domain comprises the amino acid sequence of SEQ ID NO: 303, or a functional fragment or variant thereof. In certain embodiments, the functional fragment is shorter than any one of the aforementioned sequence by at most 30, 25, 20, 15, 10, 9, 8, 7, 6, 5, 4, 3, 2, or 1 amino acid residues at the N- and/or C-terminus. In certain embodiments, the functional variant has at least 80%, 85%, 90%, 95%, 96%, 97%, 98%, or 99% sequence identity with the amino acid sequence of SEQ ID NO: 303, and/or is a conservatively-substituted variant of the amino acid sequence of SEQ ID NO: 303.

[0214] In certain embodiments, the antigen-binding domain is encoded by SEQ ID NO: 304, or a functional fragment or variant thereof. In certain embodiments, the functional variant has at least 80%, 85%, 90%, 95%, 96%, 97%, 98%, or 99% sequence identity with SEQ ID NO: 304; hybridizes under stringent hybridization conditions with the complement of the nucleic acid sequence of SEQ ID NO: 304; or is a codon degenerate variant of SEQ ID NO: 304.

[0215] 3. MUC1-specific Antigen-Binding Domain

[0216] In one embodiment, the antigen-binding domain binds to an epitope on MUC1. In some embodiments, the anti-MUC1 antibody fragment is a Fab, Fab2, (Fab′)₂, Fv, (Fv)₂, scFv, scFv-F_{C}, F_{C}, diabody, triabody, or minibody of the anti-MUC1. In some embodiments, the anti-MUC1 antibody fragment is a single-domain antibody of the anti-MUC1 antibody. In some embodiments, the single-domain antibody is a V_{NAR} or V_{H}H fragment of the anti-MUC1 antibody.

[0217] In some embodiments, a CAR described herein comprises an antigen-binding domain comprising a VL polypeptide of MUC1.

[0218] In certain embodiments, the antigen-binding domain comprises a VL domain comprising the amino acid sequence of any one of SEQ ID NOs: 310-314, or a functional fragment or variant thereof. In certain embodiments, the functional fragment is shorter than the amino acid sequence of any one of SEQ ID NOs: 310-314 by at most 30, 25, 20, 15, 10, 9, 8, 7, 6, 5, 4, 3, 2, or 1 amino acid residues at the N- and/or C-terminus. In certain embodiments, the functional variant has at least 80%, 85%, 90%, 95%, 96%, 97%, 98%, or 99% sequence identity with the amino acid sequence of any one of SEQ ID NOs: 310-314, and/or is a conservatively-substituted variant of the amino acid sequence of any one of SEQ ID NOs: 310-314.

[0219] In some embodiments, a CAR described herein comprises an antigen-binding domain comprising a VH polypeptide of MUC1.

[0220] In certain embodiments, the antigen-binding domain comprises a VH domain comprising the amino acid sequence of any one of SEQ ID NOs: 305-309, or a functional fragment or variant thereof. In certain embodiments, the functional fragment is shorter than the amino acid sequence of any one of SEQ ID NOs: 305-309 by at most 30, 25, 20, 15, 10, 9, 8, 7, 6, 5, 4, 3, 2, or 1 amino acid residues at the N- and/or C-terminus. In certain embodiments, the functional variant has at least 80%, 85%, 90%, 95%, 96%, 97%, 98%, or 99% sequence identity with the amino acid sequence of any one of SEQ ID NOs: 305-309, and/or is a conservatively-substituted variant of the amino acid sequence of any one of SEQ ID NOs: 305-309.

[0221] In some embodiments, the antigen binding moiety can comprise VH and VL that are directionally linked, for example, from N to C terminus, VH-linker-VL or VL-linker-VH. Any linker as described herein can be used to link the VH and VL domains.

[0222] 4. MUC16-Specific Antigen-Binding Domain

[0223] In some embodiments, the antigen binding moiety of a CAR described herein is specific to MUC16 (MUC16 CAR). The MUC16-specific CAR, when expressed on the cell surface, redirects the specificity of T cells to human MUC16.

[0224] In certain embodiments, the antigen-binding domain comprises a VL domain comprising the amino acid sequence of any one of SEQ ID NOs: 329, 331, 333, 335, 337, 339, 341, 662, 664, 666, 668, 670, 688, 690, 692, 694, 696, 698, and 700, or a functional fragment or variant thereof. In certain embodiments, the functional fragment is shorter than the amino acid sequence of any one of the aforementioned sequences by at most 30, 25, 20, 15, 10, 9, 8, 7, 6, 5, 4, 3, 2, or 1 amino acid residues at the N- and/or C-terminus. In certain embodiments, the functional variant has at least 80%, 85%, 90%, 95%, 96%, 97%, 98%, or 99% sequence identity with the amino acid sequence of any one of SEQ ID NOs: 329, 331, 333, 335, 337, 339, 341, 662, 664, 666, 668, 670, 688, 690, 692, 694, 696, 698, and 700; and/or is a conservatively-substituted variant of the amino acid sequence of any one of SEQ ID NOs: 329, 331, 333, 335, 337, 339, 341, 662, 664, 666, 668, 670, 688, 690, 692, 694, 696, 698, and 700.

[0225] In certain embodiments, the antigen-binding domain comprises a VL domain encoded by any one of SEQ ID NOs: 330, 332, 334, 336, 338, 340, 342, 663, 665, 667, 669, 671, 689, 691, 693, 695, 697, 699, and 701, or a functional fragment or variant thereof. In certain embodiments, the functional variant has at least 80%, 85%, 90%, 95%, 96%, 97%, 98%, or 99% sequence identity with any one of SEQ ID NOs: 330, 332, 334, 336, 338, 340, 342, 663, 665, 667, 669, 671, 689, 691, 693, 695, 697, 699, and 701; or hybridizes under stringent hybridization conditions with the complement of any one of SEQ ID NOs: 330, 332, 334, 336, 338, 340, 342, 663, 665, 667, 669, 671, 689, 691, 693, 695, 697, 699, and 701.

[0226] In certain embodiments, the antigen-binding domain comprises a VL domain comprising the amino acid sequence of SEQ ID NO: 692, or a functional fragment or variant thereof. In certain embodiments, the functional fragment is shorter than SEQ ID NO: 692 by at most 30, 25, 20, 15, 10, 9, 8, 7, 6, 5, 4, 3, 2, or 1 amino acid residues at the N- and/or C-terminus. In certain embodiments, the functional variant has at least 80%, 85%, 90%, 95%, 96%, 97%, 98%, or 99% sequence identity with the amino acid sequence of SEQ ID NO: 692; and/or is a conservatively-substituted variant of the amino acid sequence of SEQ ID NO: 692.

[0227] In certain embodiments, the antigen-binding domain comprises a VL domain encoded by SEQ ID NO: 693, or a functional fragment or variant thereof. In certain embodiments, the functional variant has at least 80%, 85%, 90%, 95%, 96%, 97%, 98%, or 99% sequence identity with SEQ ID NO: 693; or hybridizes under stringent hybridization conditions with the complement of SEQ ID NO: 693.

[0228] In certain embodiments, the antigen-binding domain comprises a VH domain comprising the amino acid sequence of any one of SEQ ID NOs: 315, 317, 319, 321, 323, 325, 327, 648, 650, 652, 654, 656, 658, 660, 672, 674, 676, 678, 680, 682, 684, and 686, or a functional fragment or variant thereof. In certain embodiments, the functional fragment is shorter than the amino acid sequence of any one of the aforementioned sequences by at most 30, 25, 20, 15, 10, 9, 8, 7, 6, 5, 4, 3, 2, or 1 amino acid residues at the N- and/or C-terminus. In certain embodiments, the functional variant has at least 80%, 85%, 90%, 95%, 96%, 97%, 98%, or 99% sequence identity with any one of SEQ ID NOs: 315, 317, 319, 321, 323, 325, 327, 648, 650, 652, 654, 656, 658, 660, 672, 674, 676, 678, 680, 682, 684, and 686; and/or is a conservatively-substituted variant of the amino acid sequence of any one of SEQ ID NOs: 315, 317, 319, 321, 323, 325, 327, 648, 650, 652, 654, 656, 658, 660, 672, 674, 676, 678, 680, 682, 684, and 686.

[0229] In certain embodiments, the antigen-binding domain comprises a VH domain encoded by any one of SEQ ID NOs: 316, 318, 320, 322, 324, 326, 328, 649, 651, 653, 655, 657, 659, 661, 673, 675, 677, 679, 681, 683, 685, and 687, or a functional fragment or variant thereof. In certain embodiments, the functional variant has at least 80%, 85%, 90%, 95%, 96%, 97%, 98%, or 99% sequence identity with any one of SEQ ID NOs: 316, 318, 320, 322, 324, 326, 328, 649, 651, 653, 655, 657, 659, 661, 673, 675, 677, 679, 681, 683, 685, and 687; or hybridizes under stringent hybridization conditions with the complement of any one of SEQ ID NOs: 316, 318, 320, 322, 324, 326, 328, 649, 651, 653, 655, 657, 659, 661, 673, 675, 677, 679, 681, 683, 685, and 687.

[0230] In certain embodiments, the antigen-binding domain comprises a VH domain comprising the amino acid sequence of SEQ ID NO: 676, or a functional fragment or variant thereof. In certain embodiments, the functional fragment is shorter than SEQ ID NO: 676 by at most 30, 25, 20, 15, 10, 9, 8, 7, 6, 5, 4, 3, 2, or 1 amino acid residues at the N- and/or C-terminus. In certain embodiments, the functional variant has at least 80%, 85%, 90%, 95%, 96%, 97%, 98%, or 99% sequence identity with the amino acid sequence of SEQ ID NO: 676; and/or is a conservatively-substituted variant of the amino acid sequence of SEQ ID NO: 676.

[0231] In certain embodiments, the antigen-binding domain comprises a VH domain encoded by SEQ ID NO: 677, or a functional fragment or variant thereof. In certain embodiments, the functional variant has at least 80%, 85%, 90%, 95%, 96%, 97%, 98%, or 99% sequence identity with SEQ ID NO: 677; or hybridizes under stringent hybridization conditions with the complement of SEQ ID NO: 677.

[0232] In some embodiments, the antigen binding moiety can comprise VH and VL that are directionally linked, for example, from N to C terminus, VH-linker-VL or VL-linker-VH. Any linker as described herein can be used to link the VH and VL domains.

[0233] In some embodiments, the antigen-binding domain comprises a single chain antibody fragment (scFv) comprising a variable domain light chain (VL) and variable domain heavy chain (VH) of a target antigen specific monoclonal anti-MUC16 antibody joined by a flexible linker, such as a glycine-serine linker or a Whitlow linker. In certain embodiments, the scFv comprises the VH and VL from MUC16-3 and a linker. In certain such embodiments, the scFv comprises the amino acid sequence of SEQ ID NO: 343, or a functional fragment or variant thereof. In certain embodiments, the functional fragment is shorter than the amino acid sequence of SEQ ID NO: 343 by at most 30, 25, 20, 15, 10, 9, 8, 7, 6, 5, 4, 3, 2, or 1 amino acid residues at the N- and/or C-terminus. In certain embodiments, the functional variant has at least 80%, 85%, 90%, 95%, 96%, 97%, 98%, or 99% sequence identity with the amino acid sequence of SEQ ID NO: 343; and/or is a conservatively-substituted variant of the amino acid sequence of SEQ ID NO: 343.

[0234] In certain embodiments, the antigen-binding domain comprises a scFv encoded by SEQ ID NO: 344, or a functional fragment or variant thereof. In certain embodiments, the functional variant has at least 80%, 85%, 90%, 95%, 96%, 97%, 98%, or 99% sequence identity with SEQ ID NO: 344; or hybridizes under stringent hybridization conditions with the complement of SEQ ID NO: 344.

[0235] 5. ROR1-Specific Antigen-Binding Domain

[0236] In some embodiments, a CAR described herein comprises an antigen-binding domain comprising the V_{L}domain of an anti-ROR1 antibody.

[0237] In certain such embodiments, the antigen-binding domain may comprise an amino acid sequence of any one of SEQ ID NOs: 347, 351, 355, 359, 363, 367, 371, 375, 379, 383, 387, 391, 395, 399, 403, 407, 411, 415, 419, 423, 427, 431, 435, 439, 443, 447, 451, 455, 459, and 463, or a functional fragment or variant thereof. In certain embodiments, the functional fragment is shorter than any one of the aforementioned sequences by at most 30, 25, 20, 15, 10, 9, 8, 7, 6, 5, 4, 3, 2, or 1 amino acid residues at the N- and/or C-terminus. In certain embodiments, the functional variant has at least 80%, 85%, 90%, 95%, 96%, 97%, 98%, or 99% sequence identity with any one of SEQ ID NOs: 347, 351, 355, 359, 363, 367, 371, 375, 379, 383, 387, 391, 395, 399, 403, 407, 411, 415, 419, 423, 427, 431, 435, 439, 443, 447, 451, 455, 459, and 463, and/or is a conservatively-substituted variant of the amino acid sequence of any one of SEQ ID NOs: 347, 351, 355, 359, 363, 367, 371, 375, 379, 383, 387, 391, 395, 399, 403, 407, 411, 415, 419, 423, 427, 431, 435, 439, 443, 447, 451, 455, 459, and 463.

[0238] In certain embodiments, the antigen-binding domain comprises a V_{L} domain encoded by any one of SEQ ID NOs: 348, 352, 356, 360, 364, 368, 372, 376, 380, 384, 388, 392, 396, 400, 404, 408, 412, 416, 420, 424, 428, 432, 436, 440, 444, 448, 452, 456, 460, and 464, or a functional fragment or variant thereof. In certain embodiments, the functional variant has at least 80%, 85%, 90%, 95%, 96%, 97%, 98%, or 99% sequence identity with any one of SEQ ID NOs: 348, 352, 356, 360, 364, 368, 372, 376, 380, 384, 388, 392, 396, 400, 404, 408, 412, 416, 420, 424, 428, 432, 436, 440, 444, 448, 452, 456, 460, and 464; hybridizes under stringent hybridization conditions with the complement of any one of SEQ ID NOs: 348, 352, 356, 360, 364, 368, 372, 376, 380, 384, 388, 392, 396, 400, 404, 408, 412, 416, 420, 424, 428, 432, 436, 440, 444, 448, 452, 456, 460, and 464; or is a codon degenerate variant of any one of SEQ ID NOs: 348, 352, 356, 360, 364, 368, 372, 376, 380, 384, 388, 392, 396, 400, 404, 408, 412, 416, 420, 424, 428, 432, 436, 440, 444, 448, 452, 456, 460, and 464.

[0239] In some embodiments, a CAR described herein comprises the VH domain of an anti-ROR1 antibody.

[0240] In certain such embodiments, the antigen-binding domain may comprise an amino acid sequence of any one of SEQ ID NOs: 349, 353, 357, 361, 365, 369, 373, 377, 381, 385, 389, 393, 397, 401, 405, 409, 413, 417, 421, 425, 429, 433, 437, 441, 445, 449, 453, 457, and 461, or a functional fragment or variant thereof. In certain embodiments, the functional fragment is shorter than any one of the aforementioned sequences by at most 30, 25, 20, 15, 10, 9, 8, 7, 6, 5, 4, 3, 2, or 1 amino acid residues at the N- and/or C-terminus. In certain embodiments, the functional variant has at least 80%, 85%, 90%, 95%, 96%, 97%, 98%, or 99% sequence identity with any one of SEQ ID NOs: 349, 353, 357, 361, 365, 369, 373, 377, 381, 385, 389, 393, 397, 401, 405, 409, 413, 417, 421, 425, 429, 433, 437, 441, 445, 449, 453, 457, and 461, and/or is a conservatively-substituted variant of the amino acid sequence of any one of SEQ ID NOs: 349, 353, 357, 361, 365, 369, 373, 377, 381, 385, 389, 393, 397, 401, 405, 409, 413, 417, 421, 425, 429, 433, 437, 441, 445, 449, 453, 457, and 461.

[0241] In certain embodiments, the antigen-binding domain comprises a VH domain encoded by any one of SEQ ID NOs: 350, 354, 358, 362, 366, 370, 374, 378, 382, 386, 390, 394, 398, 402, 406, 410, 414, 418, 422, 426, 430, 434, 438, 442, 446, 450, 454, 458, and 462, or a functional fragment or variant thereof. In certain embodiments, the functional variant has at least 80%, 85%, 90%, 95%, 96%, 97%, 98%, or 99% sequence identity with any one of SEQ ID NOs: 350, 354, 358, 362, 366, 370, 374, 378, 382, 386, 390, 394, 398, 402, 406, 410, 414, 418, 422, 426, 430, 434, 438, 442, 446, 450, 454, 458, and 462; hybridizes under stringent hybridization conditions with the complement of any one of SEQ ID NOs: 350, 354, 358, 362, 366, 370, 374, 378, 382, 386, 390, 394, 398, 402, 406, 410, 414, 418, 422, 426, 430, 434, 438, 442, 446, 450, 454, 458, and 462; or is a codon degenerate variant of any one of SEQ ID NOs: 350, 354, 358, 362, 366, 370, 374, 378, 382, 386, 390, 394, 398, 402, 406, 410, 414, 418, 422, 426, 430, 434, 438, 442, 446, 450, 454, 458, and 462.

[0242] In certain embodiments, the antigen-binding domain comprises at least one CDR selected from those comprising the amino acid sequence of any one of the CDRs that bind ROR1 or a functional fragment or variant thereof.

[0243] In certain embodiments, the antigen-binding domain comprises the amino acid sequence of any one of SEQ ID NOs: 715-725, or a functional fragment or variant thereof. In certain embodiments, the functional fragment is shorter than the sequence of any one of the aforementioned sequences by at most 5, 4, 3, 2, or 1 amino acid residues at the N- and/or C-terminus. In certain embodiments, the functional variant has at least 80%, 85%, 90%, 95%, 96%, 97%, 98%, or 99% sequence identity with any one of SEQ ID NOs: 715-725, and/or is a conservatively-substituted variant of any one of SEQ ID NOs: 715-725.

[0244] In certain embodiments, the antigen-binding domain comprises a V_{H} domain comprising the amino acid sequences of SEQ ID NO: 715, SEQ ID NO: 716, and SEQ ID NO: 717.

[0245] In certain embodiments, the antigen-binding domain comprises a V_{H} domain comprising the amino acid sequences of SEQ ID NO: 718, SEQ ID NO: 719, and SEQ ID NO: 720.

[0246] In certain embodiments, the antigen-binding domain comprises a V_{L} domain comprising the amino acid sequences of SEQ ID NO: 721, SEQ ID NO: 722, and SEQ ID NO: 723.

[0247] In certain embodiments, the antigen-binding domain comprises a V_{L} domain comprising the amino acid sequences of SEQ ID NO: 724, SEQ ID NO: 725, and SEQ ID NO: 723.

[0248] In certain embodiments, the antigen-binding domain comprises both the aforementioned V_{H} and VL domains.

[0249] In certain embodiments, the antigen-binding domain comprises a variable heavy chain domain comprising the amino acid sequence of SEQ ID NO: 349 or a functional fragment or variant thereof. In certain embodiments, the functional fragment is shorter than SEQ ID NO: 349 by at most 30, 25, 20, 15, 10, 9, 8, 7, 6, 5, 4, 3, 2, or 1 amino acid residues at the N- and/or C-terminus. In certain embodiments, the functional variant has at least 80%, 85%, 90%, 95%, 96%, 97%, 98%, or 99% sequence identity with SEQ ID NO: 349, and/or is a conservatively-substituted variant of the amino acid sequence of SEQ ID NO: 349.

[0250] In certain embodiments, the antigen-binding domain comprises a V_{H} domain encoded by SEQ ID NO: 350, or a functional fragment or variant thereof. In certain embodiments, the functional variant has at least 80%, 85%, 90%, 95%, 96%, 97%, 98%, or 99% sequence identity with SEQ ID NO: 350; hybridizes under stringent hybridization conditions with the complement SEQ ID NO: 350; or is a codon degenerate variant of SEQ ID NO: 350.

[0251] In certain embodiments, the antigen-binding domain comprises a variable light chain domain comprising the amino acid sequence of SEQ ID NO: 387 or a functional fragment or variant thereof. In certain embodiments, the functional fragment is shorter than SEQ ID NO: 387 by at most 30, 25, 20, 15, 10, 9, 8, 7, 6, 5, 4, 3, 2, or 1 amino acid residues at the N- and/or C-terminus. In certain embodiments, the functional variant has at least 80%, 85%, 90%, 95%, 96%, 97%, 98%, or 99% sequence identity with SEQ ID NO: 387, and/or is a conservatively-substituted variant of the amino acid sequence of SEQ ID NO: 387.

[0252] In certain embodiments, the antigen-binding domain comprises a V_{L} domain encoded by SEQ ID NO: 388, or a functional fragment or variant thereof. In certain embodiments, the functional variant has at least 80%, 85%, 90%, 95%, 96%, 97%, 98%, or 99% sequence identity with SEQ ID NO: 388; hybridizes under stringent hybridization conditions with the complement SEQ ID NO: 388; or is a codon degenerate variant of SEQ ID NO: 388.

[0253] In certain embodiments, the antigen-binding domain comprises a variable heavy chain domain comprising the amino acid sequence of SEQ ID NO: 349 or a functional fragment or variant thereof, wherein the variable heavy chain domain comprises, in N-terminal to C-terminal order, the sequences of SEQ ID NO: 715, SEQ ID NO: 716, and SEQ ID NO: 717. In certain embodiments, the functional fragment is shorter than SEQ ID NO: 349 by at most 30, 25, 20, 15, 10, 9, 8, 7, 6, 5, 4, 3, 2, or 1 amino acid residues at the N- and/or C-terminus. In certain embodiments, the functional variant has at least 80%, 85%, 90%, 95%, 96%, 97%, 98%, or 99% sequence identity with SEQ ID NO: 349, and/or is a conservatively-substituted variant of the amino acid sequence of SEQ ID NO: 349.

[0254] In certain embodiments, the antigen-binding domain comprises a variable heavy chain domain comprising the amino acid sequence of SEQ ID NO: 349 or a functional fragment or variant thereof, wherein the variable heavy chain domain comprises, in N-terminal to C-terminal order, the sequences of SEQ ID NO: 718, SEQ ID NO: 719, and SEQ ID NO: 720. In certain embodiments, the functional fragment is shorter than SEQ ID NO: 349 by at most 30, 25, 20, 15, 10, 9, 8, 7, 6, 5, 4, 3, 2, or 1 amino acid residues at the N- and/or C-terminus. In certain embodiments, the functional variant has at least 80%, 85%, 90%, 95%, 96%, 97%, 98%, or 99% sequence identity with SEQ ID NO: 349, and/or is a conservatively-substituted variant of the amino acid sequence of SEQ ID NO: 349.

[0255] In certain embodiments, the antigen-binding domain comprises a variable light chain domain comprising the amino acid sequence of SEQ ID NO: 387 or a functional fragment or variant thereof, wherein the variable heavy chain domain comprises, in N-terminal to C-terminal order, the sequences of SEQ ID NO: 721, SEQ ID NO: 722, and SEQ ID NO: 723. In certain embodiments, the functional fragment is shorter than SEQ ID NO: 387 by at most 30, 25, 20, 15, 10, 9, 8, 7, 6, 5, 4, 3, 2, or 1 amino acid residues at the N- and/or C-terminus. In certain embodiments, the functional variant has at least 80%, 85%, 90%, 95%, 96%, 97%, 98%, or 99% sequence identity with SEQ ID NO: 387, and/or is a conservatively-substituted variant of the amino acid sequence of SEQ ID NO: 387.

[0256] In certain embodiments, the antigen-binding domain comprises a variable light chain domain comprising the amino acid sequence of SEQ ID NO: 387 or a functional fragment or variant thereof, wherein the variable heavy chain domain comprises, in N-terminal to C-terminal order, the sequences of SEQ ID NO: 724, SEQ ID NO: 725, and SEQ ID NO: 723. In certain embodiments, the functional fragment is shorter than SEQ ID NO: 387 by at most 30, 25, 20, 15, 10, 9, 8, 7, 6, 5, 4, 3, 2, or 1 amino acid residues at the N- and/or C-terminus. In certain embodiments, the functional variant has at least 80%, 85%, 90%, 95%, 96%, 97%, 98%, or 99% sequence identity with SEQ ID NO: 387, and/or is a conservatively-substituted variant of the amino acid sequence of SEQ ID NO: 387.

[0257] In certain embodiments, the antigen-binding domain comprises a variable heavy chain domain comprising the amino acid sequence of SEQ ID NO: 726 or a functional fragment or variant thereof. In certain embodiments, the functional fragment is shorter than SEQ ID NO: 726 by at most 30, 25, 20, 15, 10, 9, 8, 7, 6, 5, 4, 3, 2, or 1 amino acid residues at the N- and/or C-terminus. In certain embodiments, the functional variant has at least 80%, 85%, 90%, 95%, 96%, 97%, 98%, or 99% sequence identity with SEQ ID NO: 726, and/or is a conservatively-substituted variant of the amino acid sequence of SEQ ID NO: 726.

[0258] In certain embodiments, the antigen-binding domain comprises a variable light chain domain comprising the amino acid sequence of SEQ ID NO: 727 or a functional fragment or variant thereof. In certain embodiments, the functional fragment is shorter than SEQ ID NO: 727 by at most 30, 25, 20, 15, 10, 9, 8, 7, 6, 5, 4, 3, 2, or 1 amino acid residues at the N- and/or C-terminus. In certain embodiments, the functional variant has at least 80%, 85%, 90%, 95%, 96%, 97%, 98%, or 99% sequence identity with SEQ ID NO: 727, and/or is a conservatively-substituted variant of the amino acid sequence of SEQ ID NO: 727.

[0259] In certain embodiments, the antigen-binding domain comprises a variable heavy chain domain comprising the amino acid sequence of SEQ ID NO: 728 or a functional fragment or variant thereof. In certain embodiments, the functional fragment is shorter than SEQ ID NO: 728 by at most 30, 25, 20, 15, 10, 9, 8, 7, 6, 5, 4, 3, 2, or 1 amino acid residues at the N- and/or C-terminus. In certain embodiments, the functional variant has at least 80%, 85%, 90%, 95%, 96%, 97%, 98%, or 99% sequence identity with SEQ ID NO: 728, and/or is a conservatively-substituted variant of the amino acid sequence of SEQ ID NO: 728.

[0260] In certain embodiments, the antigen-binding domain comprises a variable light chain domain comprising the amino acid sequence of SEQ ID NO: 729 or a functional fragment or variant thereof. In certain embodiments, the functional fragment is shorter than SEQ ID NO: 729 by at most 30, 25, 20, 15, 10, 9, 8, 7, 6, 5, 4, 3, 2, or 1 amino acid residues at the N- and/or C-terminus. In certain embodiments, the functional variant has at least 80%, 85%, 90%, 95%, 96%, 97%, 98%, or 99% sequence identity with SEQ ID NO: 729, and/or is a conservatively-substituted variant of the amino acid sequence of SEQ ID NO: 729.

[0261] In certain embodiments, the antigen-binding domain comprises a linker that links the V_{H} and VL domains. In certain such embodiments, the linker comprises: (a) the amino acid sequence of SEQ ID NO: 424 ((G₄S)₃) or a conservatively-substituted variant thereof; or (b) an amino acid sequence having at least 80%, 85%, 90%, 95%, 96%, 97%, 98%, or 99% sequence identity with SEQ ID NO: 424. In certain such embodiments, the linker is encoded by SEQ ID NO: 425, hybridizes under stringent conditions to the complement of SEQ ID NO: 425, or is a codon degenerate version of SEQ ID NO: 425. Any linker as described herein can be used to link the VH and VL domains.

[0262] In certain embodiments, the antigen-binding domain comprises an scFv. In certain such embodiments, the domain comprises an amino acid sequence of SEQ ID NO: 465, or a functional fragment or variant thereof. In certain embodiments, the functional fragment is shorter than SEQ ID NO: 465 by at most 30, 25, 20, 15, 10, 9, 8, 7, 6, 5, 4, 3, 2, or 1 amino acid residues at the N- and/or C-terminus. In certain embodiments, the functional variant has at least 80%, 85%, 90%, 95%, 96%, 97%, 98%, or 99% sequence identity with SEQ ID NO: 465, and/or is a conservatively-substituted variant of the amino acid sequence of SEQ ID NO: 465.

[0263] In certain embodiments, the antigen-binding domain comprises an scFv encoded by SEQ ID NO: 466, or a functional fragment or variant thereof. In certain embodiments, the functional variant has at least 80%, 85%, 90%, 95%, 96%, 97%, 98%, or 99% sequence identity with SEQ ID NO: 466; hybridizes under stringent hybridization conditions with the complement SEQ ID NO: 466; or is a codon degenerate variant of SEQ ID NO: 466.

[0264] 6. EGFRvIII-Specific Antigen-Binding Domain

[0265] In another embodiment, a CAR described herein is a EGFRvIII-specific CAR. “EGFRvIII”, “EGFR variant III”, “EGFR type III mutant”, “EGFR.D2-7” or “de2-7EGFR” is a mutated form of epidermal growth factor receptor (EGFR; ErbB-1; HER1), a transmembrane protein that is a receptor for members of the epidermal growth factor (EGF) family of extracellular protein ligands in human and non-human subjects. EGFRvIII is characterized by a deletion of exons 2-7 of the wild type EGFR gene, which results in an in-frame deletion of 267 amino acids in the extracellular domain of the full length wild type EGFR protein. EGFRvIII also contains a novel glycine residue inserted at the fusion junction compared to wild type EGFR. The truncated receptor EGFRvIII is unable to bind any known EGFR ligand; however, it shows constitutive tyrosine kinase activity. This constitutive activation is important to its pro-oncogenic effect. A kinase-deficient EGFRvIII is unable to confer a similar oncogenic advantage. EGFRvIII is highly expressed in glioblastoma (GBM) and can be detected in some other solid tumor types but not in normal tissues.

[0266] In some embodiments, the antigen binding moiety of a CAR described herein is specific to EGFRvIII (EGFRvIII CAR). The EGFRvIII-specific CAR, when expressed on the cell surface, redirects the specificity of T cells to human EGFRvIII. In embodiments, the antigen binding domain comprises a single chain antibody fragment (scFv) comprising a variable domain light chain (VL) and variable domain heavy chain (VH) of a target antigen specific monoclonal anti-EGFRvIII antibody joined by a flexible linker, such as a glycine-serine linker or a Whitlow linker. In some embodiments, the antigen binding moiety may comprise VH and VL that are directionally linked, for example, from N to C terminus, VH-linker-VL or VL-linker-VH.

[0267] B. Spacer

[0268] In some embodiments, a chimeric antigen receptor of the present disclosure further includes a spacer that is used to link the antigen-binding domain to the transmembrane domain. In some embodiments, the spacer is flexible enough to allow the antigen-binding domain to orient in different directions to facilitate antigen recognition.

[0269] In certain embodiments, a chimeric antigen receptor comprising a spacer has improved functional activity compared to an otherwise identical antigen-binding polypeptide lacking the spacer. In certain embodiments, a chimeric antigen receptor comprising a spacer has increased expression on a cell surface compared to an otherwise identical polypeptide lacking the spacer. In an embodiment, a chimeric antigen receptor comprising a spacer is a polypeptide that, were it not for the spacer, would not express on the cell membrane surface and/or would not be able to bind its target due to lack of proximity or steric hindrance.

[0270] In certain embodiments, the spacer comprises a stalk region, for example a hinge region from an antibody. In some instances, the stalk region comprises the hinge region from an IgG, for example IgG1. In alternative instances, the stalk region comprises the CH₂CH₃ region of immunoglobulin and, optionally, portions of CD3. In some cases, the stalk region comprises a CD8α hinge region (SEQ ID NO: 426), an IgG4-Fc 12 amino acid hinge region (SEQ ID NO: 631), or an IgG4 hinge region as described in WO2016/073755. The stalk region can be an extracellular portion of the CAR that links the antigen-binding domain to the cell surface and/or transmembrane region.

[0271] In some embodiments, the stalk region can be from about 20 to about 300 amino acids in length. In some cases, the stalk region can be about 20, 21, 22, 23, 24, 25, 26, 27, 28, 29, 30, 31, 32, 33, 34, 35, 36, 37, 38, 39, 40, 41, 42, 43, 44, 45, 46, 47, 48, 49, 50, 51, 52, 53, 54, 55, 56, 57, 58, 59, 60 or greater amino acids in length. In other cases, the stalk region can be about: 100, 125, 150, 175, 200, 225, 250, 275 or 300 amino acids in length. In some cases a stalk region can be less than 20 amino acids in length.

[0272] In some embodiments, the stalk region comprises a CD8α hinge domain, a CD28 hinge domain or a CTLA-4 hinge domain, or a functional fragment or variant thereof.

[0273] In certain embodiments, the stalk region comprises a CD8α hinge region, or a functional fragment or variant thereof. In certain such embodiments, the spacer comprises the amino acid sequence of SEQ ID NO: 426 or a functional fragment or variant thereof. In certain embodiments, the functional fragment is shorter than the amino acid sequence of SEQ ID NO: 467 by at most 30, 25, 20, 15, 10, 9, 8, 7, 6, 5, 4, 3, 2, or 1 amino acid residues at the N- and/or C-terminus. In certain embodiments, the functional variant has at least 80%, 85%, 90%, 95%, 96%, 97%, 98%, or 99% sequence identity with the amino acid sequence of SEQ ID NO: 467, and/or is a conservatively-substituted variant of the amino acid sequence of SEQ ID NO: 467.

[0274] In certain embodiments, the CD8α hinge region, or functional fragment or variant thereof, is encoded by SEQ ID NO: 468, or a functional fragment or variant thereof. In certain embodiments, the functional variant has at least 80%, 85%, 90%, 95%, 96%, 97%, 98%, or 99% sequence identity with SEQ ID NO: 468, hybridizes under stringent hybridization conditions with the complement of SEQ ID NO: 468, or is a codon degenerate variant of SEQ ID NO: 468.

[0275] In some embodiments, the stalk region can be capable of dimerizing with a homologous stalk region of a second CAR.

[0276] In certain embodiments, in addition to a stalk region, the spacer may comprise one or more stalk extension region(s). In certain embodiments, the stalk extension region is a polypeptide that is homologous to the stalk region. For example, it may comprise at least one amino acid residue substitution as compared with the stalk region. In some embodiments, the stalk region comprises a sequence with at least about 70%, 75%, 80%, 85%, 90%, 95%, 96%, 97%, 98%, or 99% identity to the stalk region to which it is attached, for example a CD8α hinge domain, a CD28 hinge domain, or a CTLA-4 hinge domain.

[0277] In some embodiments, the spacer comprises 1, 2, 3, 4, 5, 6, 7, 8, 9, 10, 11, 12, 13, 14, 15, 16, 17, 18, 19, or 20 stalk extension regions.

[0278] In certain embodiments, the stalk region can be linked to the stalk extension region by way of a linker.

[0279] In certain embodiments, the stalk extension region can comprise about 1, 2, 3, 4, 5, 6, 7, 8, 9, or 10 times the length of the stalk region as measured by number of amino acids.

[0280] In some embodiments, the stalk region comprises at least one dimerization site. In certain embodiments, the stalk region may comprise one or more dimerization sites to form homo- or hetero-dimerized chimeric polypeptides. In other embodiments, the stalk region or one or more stalk extension regions may contain mutations that eliminate dimerization sites altogether.

[0281] In certain embodiments, the stalk extension region has at least one fewer dimerization site as compared to a stalk region. For example, if a stalk region comprises two dimerization sites, a stalk extension region can comprise one or zero dimerization sites. As another example, if a stalk region comprises one dimerization site, a stalk extension region can comprise zero dimerization sites. In some examples, a stalk extension region lacks a dimerization site. In some cases, one or more dimerization site(s) can be membrane proximal. In other cases, one or more dimerization site(s) can be membrane distal.

[0282] In certain embodiments, the dimerization site is a cysteine residue capable of forming a disulfide bond. In certain embodiments, the stalk extension region is capable of forming fewer disulfide bond(s) as compared to a stalk region. For example, if a stalk region is capable of forming two disulfide bonds, a stalk extension region may be capable of forming one or no disulfide bonds. As another example, if a stalk region is capable of forming one disulfide bond, a stalk extension region may be capable of forming no such bonds.

[0283] Each of the stalk extension regions can be about 10, 15, 20, 25, 30, 35, 40, 45, 50, 55, 60, 65, or greater amino acids in length.

[0284] In certain embodiments, the stalk extension region is homologous to the CD8α hinge region. In certain such embodiments, the stalk extension region comprises the amino acid sequence of SEQ ID NO: 469 or a functional fragment or variant thereof. In certain embodiments, the functional fragment is shorter than the amino acid sequence of SEQ ID NO: 469 by at most 30, 25, 20, 15, 10, 9, 8, 7, 6, 5, 4, 3, 2, or 1 amino acid residues at the N- and/or C-terminus. In certain embodiments, the functional variant has at least 80%, 85%, 90%, 95%, 96%, 97%, 98%, or 99% sequence identity with the amino acid sequence of SEQ ID NO: 469, and/or is a conservatively-substituted variant of the amino acid sequence of SEQ ID NO: 469.

[0285] In certain embodiments, the stalk extension region is encoded by any one of SEQ ID NOs: 470-472, or a functional fragment or variant thereof. In certain embodiments, the functional variant has at least 80%, 85%, 90%, 95%, 96%, 97%, 98%, or 99% sequence identity with any one of SEQ ID NOs: 470-472, hybridizes under stringent hybridization conditions with the complement of any one of SEQ ID NOs: 470-472, or is a codon degenerate variant of any one of SEQ ID NOs: 470-472.

[0286] In certain embodiments, the spacer comprises a stalk region and 1 to 3 stalk extension regions. In certain such embodiments, the spacer comprises a stalk region and 2 stalk extension regions, for example a CD8α hinge region and 2 stalk extension regions wherein each stalk extension region is homologous to the CD8α hinge region.

[0287] In some embodiments, each of the stalk region and stalk extension region(s) can be derived from at least one of a CD8α hinge domain, a CD28 hinge domain, a CTLA-4 hinge domain, a LNGFR extracellular domain, IgG1 hinge, IgG4 hinge and CH2-CH3 domain. The stalk and stalk extension region(s) can be separately derived from any combination of CD8α hinge domain, CD28 hinge domain, CTLA-4 hinge domain, LNGFR extracellular domain, IgG1 hinge, IgG4 hinge or CH2-CH3 domain. As an example, the stalk region can be derived from CD8α hinge domain and at least one stalk extension region can be derived from CD28 hinge domain thus creating a hybrid spacer. As another example, the stalk region can be derived from an IgG1 hinge or IgG4 hinge and at least one stalk extension region can be derived from a CH2-CH3 domain of IgG.

[0288] In certain such embodiments, the spacer comprises the amino acid sequence of SEQ ID NO: 473 or a functional fragment or variant thereof. In certain embodiments, the functional fragment is shorter than the amino acid sequence of SEQ ID NO: 473 by at most 30, 25, 20, 15, 10, 9, 8, 7, 6, 5, 4, 3, 2, or 1 amino acid residues at the N- and/or C-terminus. In certain embodiments, the functional variant has at least 80%, 85%, 90%, 95%, 96%, 97%, 98%, or 99% sequence identity with the amino acid sequence of SEQ ID NO: 473, and/or is a conservatively-substituted variant of the amino acid sequence of SEQ ID NO: 473.

[0289] In certain embodiments, the spacer is encoded by SEQ ID NO: 474, or a functional fragment or variant thereof. In certain embodiments, the functional variant has at least 80%, 85%, 90%, 95%, 96%, 97%, 98%, or 99% sequence identity with SEQ ID NO: 474, hybridizes under stringent hybridization conditions with the complement of SEQ ID NO: 474, or is a codon degenerate variant of SEQ ID NO: 474.

[0290] C. Transmembrane Domain

[0291] The transmembrane domain can be derived from either a natural or a synthetic source. Where the source is natural, the domain can, for example, be derived from any membrane-bound or transmembrane protein. Suitable transmembrane domains include transmembrane domains from a TCR-alpha chain, a TCR-beta chain, a TCR-γ1 chain, a TCR-δ chain, a TCR-zeta chain, CD28, CD3 epsilon, CD3ζ CD45, CD4, CD5, CD8α, CD9, CD16, CD22, CD33, CD37, CD64, CD80, CD86, CD134, CD137, ICOS, GITR, CD152 (CTLA-4), or CD154, or a functional fragment or variant thereof. Alternatively, the transmembrane domain can be synthetic, and can comprise hydrophobic residues such as leucine and valine. In some embodiments, a triplet of phenylalanine, tryptophan and valine is found at one or both termini of a synthetic transmembrane domain. In some embodiments, the transmembrane domain comprises a CD8α transmembrane domain, a CD152 (CTLA-4), TCRγ1, TCRδ or a CD3ζ transmembrane domain.

[0292] Optionally, a short oligonucleotide or polypeptide linker, in some embodiments between 2 and 10 amino acids in length, may link the transmembrane domain with the intracellular signaling domain of a CAR. In some embodiments, the linker is a glycine-serine linker.

[0293] In some embodiments, the transmembrane domain comprises a CD8α transmembrane domain or a CD3ζ transmembrane domain, or a functional fragments or variants thereof.

[0294] In certain embodiments, the transmembrane domain comprises a CD8α transmembrane domain, or a functional fragment or variant thereof. In certain such embodiments, the transmembrane domain comprises the amino acid sequence of SEQ ID NO: 475 or a functional fragment or variant thereof. In certain embodiments, the functional fragment is shorter than the amino acid sequence of SEQ ID NO: 475 by at most 25, 20, 15, 10, 9, 8, 7, 6, 5, 4, 3, 2, or 1 amino acid residues at the N- and/or C-terminus. In certain embodiments, the functional variant has at least 80%, 85%, 90%, 95%, 96%, 97%, 98%, or 99% sequence identity with SEQ ID NO: 475, and/or is a conservatively-substituted variant of the amino acid sequence of SEQ ID NO: 475.

[0295] In certain embodiments, the CD8α transmembrane domain, or functional fragment or variant thereof, is encoded by SEQ ID NO: 476 or a functional fragment or variant thereof. In certain embodiments, the functional variant has at least 80%, 85%, 90%, 95%, 96%, 97%, 98%, or 99% sequence identity with SEQ ID NO: 476, hybridizes under stringent hybridization conditions with the complement of SEQ ID NO: 476, or is a codon degenerate variant of SEQ ID NO: 476.

[0296] In certain embodiments, the transmembrane domain comprises a CD28 transmembrane domain, or a functional fragment or variant thereof. In certain such embodiments, the transmembrane domain comprises the amino acid sequence of SEQ ID NO: 477 or a functional fragment or variant thereof. In certain embodiments, the functional fragment is shorter than the amino acid sequence of SEQ ID NO: 477 by at most 25, 20, 15, 10, 9, 8, 7, 6, 5, 4, 3, 2, or 1 amino acid residues at the N- and/or C-terminus. In certain embodiments, the functional variant has at least 80%, 85%, 90%, 95%, 96%, 97%, 98%, or 99% sequence identity with SEQ ID NO: 477, and/or is a conservatively-substituted variant of the amino acid sequence of SEQ ID NO: 477.

[0297] In certain embodiments, the CD28 transmembrane domain, or functional fragment or variant thereof, is encoded by SEQ ID NO: 478 or a functional fragment or variant thereof. In certain embodiments, the functional variant has at least 80%, 85%, 90%, 95%, 96%, 97%, 98%, or 99% sequence identity with SEQ ID NO: 478, hybridizes under stringent hybridization conditions with the complement of SEQ ID NO: 478, or is a codon degenerate variant of SEQ ID NO: 438.

[0298] D. Intracellular Signaling Domain

[0299] The intracellular signaling domain of the CAR may be responsible for activation of at least one of the normal effector functions of the immune cell in which the CAR has been placed. The term “effector function” refers to a specialized function of a cell. Effector function of a T cell, for example, can be cytolytic activity or helper activity including the secretion of cytokines. While usually the entire intracellular signaling domain can be employed, in many cases it is not necessary to use the entire chain. To the extent that a truncated portion of the intracellular signaling domain is used, such truncated portion can be used in place of the intact chain as long as it transduces the effector function signal. In some embodiments, the intracellular domain further comprises a signaling domain for T-cell activation.

[0300] In some embodiments, the intracellular cell signaling domain interacts with a T cell, a Natural Killer (NK) cell, a cytotoxic T lymphocyte (CTL), or a regulatory T cell.

[0301] The intracellular domain can comprise an amino acid sequence derived from FCER1G, CD19, CD40, KIR3DL1, KIR3DL2, KIR2DL3, KIR2DL4, KIR2DL5, KIR3DL1, KIR3DL2, KIR3DL3, SIRPA, FCRL1, FCRL2, FCRL3, FCRL4, FCRL5, FCRL6, FCGR1A, FCGR2A, FCGR2B, FCGR3A, TLR1, TLR2, TLR3, TLR4, TLR5, TLR6, TLR7, TLR8, TLR9, TLR10, PILRB, NCR1, NCR2, NCR3, NKG2A, NKG2C, NKG2D, DAP12, FCER1G, DAP10, CD84, CD19, KIR3DL1, KIR3DL2, KIR2DL2, KIR2DL3, KIR2DL4, KIR2DL5, KIR3DL2, KIR3DL3, SIRPA, FCRL1, FCRL2, FCRL3, FCRL4, FCRL5, FCRL6, CD4, CD8A, CD8B, LAT, FCGR1A, FCGR2A, FCGR2B, FCGR3A, TLR1, TLR2, TLR3, TLR4, TLR5, TLR6, TLR7, TLR8, TLR9, TLR10, NCR1, NCR2, NCR3, LY9, NKG2C, TCR zeta, FcR gamma, FcR beta, CD3 gamma, CD3 delta, CD3 epsilon, CD3ζ, CD5, CD22, CD79a, CD79b or CD66d, or a functional fragment or variant thereof. In some cases, the signaling domain for T-cell activation comprises a domain derived from CD3ζ. or a functional fragment or variant thereof.

[0302] In certain embodiments, the intracellular signaling domain comprises a CD3ζ domain, or a functional fragment or variant thereof. In certain such embodiments, the intracellular signaling domain comprises the amino acid sequence of SEQ ID NO: 479 or a functional fragment or variant thereof. In certain embodiments, the functional fragment is shorter than SEQ ID NO: 479 by at most 30, 25, 20, 15, 10, 9, 8, 7, 6, 5, 4, 3, 2, or 1 amino acid residues at the N- and/or C-terminus. In certain embodiments, the functional variant has at least 80%, 85%, 90%, 95%, 96%, 97%, 98%, or 99% sequence identity with SEQ ID NO: 479, and/or is a conservatively-substituted variant of the amino acid sequence of SEQ ID NO: 479.

[0303] In certain embodiments, the CD3 domain, or functional fragment or variant thereof, is encoded by a nucleic acid comprising SEQ ID NO: 480 or a functional fragment or variant thereof. In certain embodiments, the functional variant has at least 80%, 85%, 90%, 95%, 96%, 97%, 98%, or 99% sequence identity with SEQ ID NO: 480, hybridizes under stringent hybridization conditions with the complement of SEQ ID NO: 480, or is a codon degenerate variant of SEQ ID NO: 480.

[0304] The intracellular signaling domain can further comprise one or more co-stimulatory domains. Exemplary co-stimulatory domains include, but are not limited to, CD8, CD27, CD28, 4-1BB (CD137), ICOS, DAP10, DAP12, OX40 (CD134), and CD3-zeta co-stimulatory domains and functional fragments or variants thereof. In some instances, a CAR described herein comprises one or more, or two or more of co-stimulatory domains selected from CD8, CD27, CD28, 4-1BB (CD137), ICOS, DAP10, DAP12, and OX40 (CD134) co-stimulatory domains and functional fragments or variants thereof. In some instances, a CAR described herein comprises one or more, or two or more of co-stimulatory domains selected from CD27, CD28, 4-1BB (CD137), ICOS, and OX40 (CD134) co-stimulatory domains and functional fragments or variants thereof. In some instances, a CAR described herein comprises one or more, or two or more of co-stimulatory domains selected from CD8, CD28, 4-1BB (CD137), DAP10, and DAP12 co-stimulatory domains and functional fragments or variants thereof. In some instances, a CAR described herein comprises one or more, or two or more co-stimulatory domains selected from CD28 and 4-1BB (CD137) co-stimulatory domains and functional fragments or variants thereof. In some instances, a CAR described herein comprises CD28 and 4-1BB (CD137) co-stimulatory domains or their respective functional fragments or variants. In some instances, a CAR described herein comprises CD28 and OX40 (CD134) co-stimulatory domains or their respective functional fragments and variants. In some instances, a CAR described herein comprises CD8 and CD28 co-stimulatory domains or their respective functional fragments and variants. In some instances, a CAR described herein comprises a CD28 co-stimulatory domains or a functional fragment or variant thereof. In some instances, a CAR described herein comprises a 4-1BB (CD137) co-stimulatory domain or a functional fragment or variant thereof. In some instances, a CAR described herein comprises an OX40 (CD134) co-stimulatory domain or a functional fragment or variant thereof. In some instances, a CAR described herein comprises a CD8 co-stimulatory domain or a functional fragment or variant thereof. In some instances, the CAR described herein comprises a DAP10 co-stimulatory domain or a functional fragment or variant thereof. In some instances, the CAR described herein comprises a DAP12 co-stimulatory domain or a functional fragment or variant thereof.

[0305] In certain embodiments, the intracellular signaling domain comprises a CD28 co-stimulatory domain, or a functional fragment or variant thereof. In certain such embodiments, the intracellular signaling domain comprises the amino acid sequence of SEQ ID NO: 481 or a functional fragment or variant thereof. In certain embodiments, the functional fragment is shorter than the amino acid sequence of SEQ ID NO: 481 by at most 30, 25, 20, 15, 10, 9, 8, 7, 6, 5, 4, 3, 2, or 1 amino acid residues at the N- and/or C-terminus. In certain embodiments, the functional variant has at least 80%, 85%, 90%, 95%, 96%, 97%, 98%, or 99% sequence identity with the amino acid sequence of SEQ ID NO: 481, and/or is a conservatively-substituted variant of the amino acid sequence of SEQ ID NO: 481.

[0306] In certain embodiments, the CD28 co-stimulatory domain, or functional fragment or variant thereof, is encoded by a nucleic acid comprising SEQ ID NO: 482 or a functional fragment or variant thereof. In certain embodiments, the functional variant has at least 80%, 85%, 90%, 95%, 96%, 97%, 98%, or 99% sequence identity with SEQ ID NO: 482, hybridizes under stringent hybridization conditions with the complement of SEQ ID NO: 482, or is a codon degenerate variant of SEQ ID NO: 442.

[0307] In certain embodiments, the intracellular signaling domain comprises a 4-1BB co-stimulatory domain, or a functional fragment or variant thereof. In certain such embodiments, the intracellular signaling domain comprises the amino acid sequence of SEQ ID NO: 483 or a functional fragment or variant thereof. In certain embodiments, the functional fragment is shorter than the amino acid sequence of SEQ ID NO: 483 by at most 30, 25, 20, 15, 10, 9, 8, 7, 6, 5, 4, 3, 2, or 1 amino acid residues at the N- and/or C-terminus. In certain embodiments, the functional variant has at least 80%, 85%, 90%, 95%, 96%, 97%, 98%, or 99% sequence identity with SEQ ID NO: 483, and/or is a conservatively-substituted variant of SEQ ID NO: 483.

[0308] In certain embodiments, the 4-1BB co-stimulatory domain, or functional fragment or variant thereof, is encoded by SEQ ID NO: 484 or a functional fragment or variant thereof. In certain embodiments, the functional variant has at least 80%, 85%, 90%, 95%, 96%, 97%, 98%, or 99% sequence identity with SEQ ID NO: 484, hybridizes under stringent hybridization conditions with the complement of SEQ ID NO: 484, or is a codon degenerate variant of SEQ ID NO: 484.

[0309] In certain embodiments, the intracellular signaling domain comprises a DAP10 co-stimulatory domain, or a functional fragment or variant thereof. In certain embodiments, the intracellular signaling domain comprises the amino acid sequence of SEQ ID NO: 485 or a functional fragment or variant thereof. In certain embodiments, the functional fragment is shorter than the amino acid sequence of SEQ ID NO: 485 by at most 30, 25, 20, 15, 10, 9, 8, 7, 6, 5, 4, 3, 2, or 1 amino acid residues at the N- and/or C-terminus. In certain embodiments, the functional variant has at least 80%, 85%, 90%, 95%, 96%, 97%, 98%, or 99% sequence identity with SEQ ID NO: 485, and/or is a conservatively-substituted variant of SEQ ID NO: 485.

[0310] In certain embodiments, the DAP10 co-stimulatory domain, or functional fragment or variant thereof, is encoded by the sequence of SEQ ID NO: 486, or a functional fragment or variant thereof. In certain embodiments, the functional variant has at least 80%, 85%, 90%, 95%, 96%, 97%, 98%, or 99% sequence identity with SEQ ID NO: 486, hybridizes under stringent hybridization conditions with the complement of SEQ ID NO: 486, or is a codon degenerate variant of SEQ ID NO: 486.

[0311] In certain embodiments, the intracellular signaling domain comprises a DAP12 co-stimulatory domain, or a functional fragment or variant thereof. In certain embodiments, the intracellular signaling domain comprises the amino acid sequence of SEQ ID NO: 487 or a functional fragment or variant thereof. In certain embodiments, the functional fragment is shorter than the amino acid sequence of SEQ ID NO: 487 by at most 30, 25, 20, 15, 10, 9, 8, 7, 6, 5, 4, 3, 2, or 1 amino acid residues at the N- and/or C-terminus. In certain embodiments, the functional variant has at least 80%, 85%, 90%, 95%, 96%, 97%, 98%, or 99% sequence identity with SEQ ID NO: 487, and/or is a conservatively-substituted variant of SEQ ID NO: 487.

[0312] In certain embodiments, the DAP12 co-stimulatory domain, or functional fragment or variant thereof, is encoded by the sequence of SEQ ID NO: 488, or functional fragment or variant thereof. In certain embodiments, the functional variant has at least 80%, 85%, 90%, 95%, 96%, 97%, 98%, or 99% sequence identity with SEQ ID NO: 488, hybridizes under stringent hybridization conditions with the complement of SEQ ID NO: 488, or is a codon degenerate variant of SEQ ID NO: 488.

[0313] In certain embodiments, the intracellular signaling domain comprises both a CD28 co-signaling domain and a 4-1BB co-signaling domain, or respective functional fragments or variants thereof, as described above.

[0314] E. Signal Peptide

[0315] In an embodiment, a signal peptide directs the nascent CAR protein into the endoplasmic reticulum. This is, for example, if the receptor is to be glycosylated and anchored in the cell membrane. Any eukaryotic signal peptide sequence is envisaged to be functional. Generally, the signal peptide natively attached to the protein or, in the case of a fusion protein, the component closest to the N-terminus is used (e.g., in a scFv with the V_{L} component at closest to the N-terminus, the native signal of the light chain is used). In some embodiments, the signal peptide is native for GM-CSFRa (SEQ ID NO: 489) or IgK (SEQ ID NO: 491), IgE (SEQ ID NO: 493) or a functional fragment or variant thereof. Other signal peptides that can be used include those native to CD8α (SEQ ID NO: 495) and CD28. In some embodiments, the signal peptide is that native to Mouse Ig V_{H} region 3 (SEQ ID NO: 497), β2M signal peptide (SEQ ID NO: 499), Azurocidin (SEQ ID NO: 501), Human Serum Albumin signal peptide (SEQ ID NO: 503), A2M receptor associated protein signal peptide (SEQ ID NO: 505), IGHV3-23 (SEQ ID NO: 507), IGKV1-D33 (HuL1) (SEQ ID NO: 509), IGKV1-D33 (L14F) (HuH7) (SEQ ID NO: 511), or a functional fragment or variant thereof.

[0316] In certain embodiments, the CAR is linked to a GM-CSFRa signal peptide, or a functional fragment or variant thereof. In certain such embodiments, the GM-CSFRa signal peptide has the amino acid sequence of SEQ ID NO: 489 or a functional fragment or variant thereof. In certain embodiments, the functional fragment is shorter than SEQ ID NO: 489 by at most 15, 10, 9, 8, 7, 6, 5, 4, 3, 2, or 1 amino acid residues at the N- and/or C-terminus. In certain embodiments, the functional variant has at least 80%, 85%, 90%, 95%, 96%, 97%, 98%, or 99% sequence identity with SEQ ID NO: 489, and/or is a conservatively-substituted variant of SEQ ID NO: 489.

[0317] In certain embodiments, the GM-CSFRa signal peptide, or functional fragment or variant thereof, is encoded by a nucleic acid comprising SEQ ID NO: 490 or a functional fragment or variant thereof. In certain embodiments, the functional variant has at least 80%, 85%, 90%, 95%, 96%, 97%, 98%, or 99% sequence identity with SEQ ID NO: 490, hybridizes under stringent hybridization conditions with the complement of SEQ ID NO: 490, or is a codon degenerate variant of SEQ ID NO: 490.

[0318] In certain embodiments, the CAR is linked to an IgK signal peptide, or a functional fragment or variant thereof. In certain such embodiments, the IgK signal peptide has the amino acid sequence of SEQ ID NO: 491 or a functional fragment or variant thereof. In certain embodiments, the functional fragment is shorter than SEQ ID NO: 491 by at most 15, 10, 9, 8, 7, 6, 5, 4, 3, 2, or 1 amino acid residues at the N- and/or C-terminus. In certain embodiments, the functional variant has at least 80%, 85%, 90%, 95%, 96%, 97%, 98%, or 99% sequence identity with SEQ ID NO: 491, and/or is a conservatively-substituted variant of SEQ ID NO: 491.

[0319] In certain embodiments, the Igκ signal peptide, or functional fragment or variant thereof, is encoded by a nucleic acid comprising SEQ ID NO: 492 or a functional fragment or variant thereof. In certain embodiments, the functional variant has at least 80%, 85%, 90%, 95%, 96%, 97%, 98%, or 99% sequence identity with SEQ ID NO: 492, hybridizes under stringent hybridization conditions with the complement of SEQ ID NO: 492, or is a codon degenerate variant of SEQ ID NO: 492.

[0320] In certain embodiments, the CAR is linked to an IgE signal peptide native to IgE (“IgE signal peptide”), or a functional fragment or variant thereof. In certain such embodiments, the IgE signal peptide the amino acid sequence of SEQ ID NO: 493 or a functional fragment or variant thereof. In certain embodiments, the functional fragment is shorter than SEQ ID NO: 493 by at most 15, 10, 9, 8, 7, 6, 5, 4, 3, 2, or 1 amino acid residues at the N- and/or C-terminus. In certain embodiments, the functional variant has at least 80%, 85%, 90%, 95%, 96%, 97%, 98%, or 99% sequence identity with SEQ ID NO: 493, and/or is a conservatively-substituted variant of SEQ ID NO: 493.

[0321] In certain embodiments, the IgE signal peptide, or functional fragment or variant thereof, is encoded by a nucleic acid comprising SEQ ID NO: 494 or a functional fragment or variant thereof. In certain embodiments, the functional variant has at least 80%, 85%, 90%, 95%, 96%, 97%, 98%, or 99% sequence identity with SEQ ID NO: 494, hybridizes under stringent hybridization conditions with the complement of SEQ ID NO: 494, or is a codon degenerate variant of SEQ ID NO: 494.

[0322] In certain embodiments, the CAR is linked to an CD8α signal peptide native to CD8α, or a functional fragment or variant thereof. In certain such embodiments, the CD8α signal peptide comprises the amino acid sequence of SEQ ID NO: 495 or a functional fragment or variant thereof. In certain embodiments, the functional fragment is shorter than SEQ ID NO: 495 by at most 15, 10, 9, 8, 7, 6, 5, 4, 3, 2, or 1 amino acid residues at the N- and/or C-terminus. In certain embodiments, the functional variant has at least 80%, 85%, 90%, 95%, 96%, 97%, 98%, or 99% sequence identity with SEQ ID NO: 495, and/or is a conservatively-substituted variant of SEQ ID NO: 495.

[0323] In certain embodiments, the CD8α signal peptide, or functional fragment or variant thereof, is encoded by a nucleic acid comprising SEQ ID NO: 496 or a functional fragment or variant thereof. In certain embodiments, the functional variant has at least 80%, 85%, 90%, 95%, 96%, 97%, 98%, or 99% sequence identity with SEQ ID NO: 496, hybridizes under stringent hybridization conditions with the complement of SEQ ID NO: 496 or is a codon degenerate variant of SEQ ID NO: 496.

[0324] In certain embodiments, the CAR is linked to a Mouse Ig VH region 3 signal peptide, or a functional fragment or variant thereof. In certain such embodiments, the Mouse Ig VH region 3 signal peptide has the amino acid sequence of SEQ ID NO: 497 or a functional fragment or variant thereof. In certain embodiments, the functional fragment is shorter than SEQ ID NO: 497 by at most 15, 10, 9, 8, 7, 6, 5, 4, 3, 2, or 1 amino acid residues at the N- and/or C-terminus. In certain embodiments, the functional variant has at least 80%, 85%, 90%, 95%, 96%, 97%, 98%, or 99% sequence identity with SEQ ID NO: 497, and/or is a conservatively-substituted variant of SEQ ID NO: 497.

[0325] In certain embodiments, the Mouse Ig VH region 3 signal peptide, or functional fragment or variant thereof, is encoded by a nucleic acid comprising SEQ ID NO: 498 or a functional fragment or variant thereof. In certain embodiments, the functional variant has at least 80%, 85%, 90%, 95%, 96%, 97%, 98%, or 99% sequence identity with SEQ ID NO: 498, hybridizes under stringent hybridization conditions with the complement of SEQ ID NO: 498, or is a codon degenerate variant of SEQ ID NO: 498.

[0326] In certain embodiments, the CAR is linked to a β2M signal peptide, or a functional fragment or variant thereof. In certain such embodiments, the β2M signal peptide has the amino acid sequence of SEQ ID NO: 499 or a functional fragment or variant thereof. In certain embodiments, the functional fragment is shorter than SEQ ID NO: 499 by at most 15, 10, 9, 8, 7, 6, 5, 4, 3, 2, or 1 amino acid residues at the N- and/or C-terminus. In certain embodiments, the functional variant has at least 80%, 85%, 90%, 95%, 96%, 97%, 98%, or 99% sequence identity with SEQ ID NO: 499, and/or is a conservatively-substituted variant of SEQ ID NO: 499.

[0327] In certain embodiments, the β2M signal peptide, or functional fragment or variant thereof, is encoded by a nucleic acid comprising SEQ ID NO: 500 or a functional fragment or variant thereof. In certain embodiments, the functional variant has at least 80%, 85%, 90%, 95%, 96%, 97%, 98%, or 99% sequence identity with SEQ ID NO: 500, hybridizes under stringent hybridization conditions with the complement of SEQ ID NO: 500, or is a codon degenerate variant of SEQ ID NO: 500.

[0328] In certain embodiments, the CAR is linked to an Azurocidin signal peptide, or a functional fragment or variant thereof. In certain such embodiments, the Azurocidin signal peptide has the amino acid sequence of SEQ ID NO: 501 or a functional fragment or variant thereof. In certain embodiments, the functional fragment is shorter than SEQ ID NO: 501 by at most 15, 10, 9, 8, 7, 6, 5, 4, 3, 2, or 1 amino acid residues at the N- and/or C-terminus. In certain embodiments, the functional variant has at least 80%, 85%, 90%, 95%, 96%, 97%, 98%, or 99% sequence identity with SEQ ID NO: 501, and/or is a conservatively-substituted variant of SEQ ID NO: 501.

[0329] In certain embodiments, the Azurocidin signal peptide, or functional fragment or variant thereof, is encoded by a nucleic acid comprising SEQ ID NO: 502 or a functional fragment or variant thereof. In certain embodiments, the functional variant has at least 80%, 85%, 90%, 95%, 96%, 97%, 98%, or 99% sequence identity with SEQ ID NO: 502, hybridizes under stringent hybridization conditions with the complement of SEQ ID NO: 502, or is a codon degenerate variant of SEQ ID NO: 502.

[0330] In certain embodiments, the CAR is linked to a human serum albumin signal peptide, or a functional fragment or variant thereof. In certain such embodiments, the human serum albumin signal peptide has the amino acid sequence of SEQ ID NO: 503 or a functional fragment or variant thereof. In certain embodiments, the functional fragment is shorter than SEQ ID NO: 503 by at most 15, 10, 9, 8, 7, 6, 5, 4, 3, 2, or 1 amino acid residues at the N- and/or C-terminus. In certain embodiments, the functional variant has at least 80%, 85%, 90%, 95%, 96%, 97%, 98%, or 99% sequence identity with SEQ ID NO: 503, and/or is a conservatively-substituted variant of SEQ ID NO: 503.

[0331] In certain embodiments, the human serum albumin signal peptide, or functional fragment or variant thereof, is encoded by a nucleic acid comprising SEQ ID NO: 504 or a functional fragment or variant thereof. In certain embodiments, the functional variant has at least 80%, 85%, 90%, 95%, 96%, 97%, 98%, or 99% sequence identity with SEQ ID NO: 504, hybridizes under stringent hybridization conditions with the complement of SEQ ID NO: 504, or is a codon degenerate variant of SEQ ID NO: 504.

[0332] In certain embodiments, the CAR is linked to an A2M receptor associated protein signal peptide, or a functional fragment or variant thereof. In certain such embodiments, A2M receptor associated protein signal peptide has the amino acid sequence of SEQ ID NO: 505 or a functional fragment or variant thereof. In certain embodiments, the functional fragment is shorter than SEQ ID NO: 505 by at most 15, 10, 9, 8, 7, 6, 5, 4, 3, 2, or 1 amino acid residues at the N- and/or C-terminus. In certain embodiments, the functional variant has at least 80%, 85%, 90%, 95%, 96%, 97%, 98%, or 99% sequence identity with SEQ ID NO: 505, and/or is a conservatively-substituted variant of SEQ ID NO: 505.

[0333] In certain embodiments, the A2M receptor associated protein signal peptide, or functional fragment or variant thereof, is encoded by a nucleic acid comprising SEQ ID NO: 506 or a functional fragment or variant thereof. In certain embodiments, the functional variant has at least 80%, 85%, 90%, 95%, 96%, 97%, 98%, or 99% sequence identity with SEQ ID NO: 506, hybridizes under stringent hybridization conditions with the complement of SEQ ID NO: 506, or is a codon degenerate variant of SEQ ID NO: 506.

[0334] In certain embodiments, the CAR is linked to an IGHV3-23 signal peptide, or a functional fragment or variant thereof. In certain such embodiments, the IGHV3-23 signal peptide has the amino acid sequence of SEQ ID NO: 507 or a functional fragment or variant thereof. In certain embodiments, the functional fragment is shorter than SEQ ID NO: 507 by at most 15, 10, 9, 8, 7, 6, 5, 4, 3, 2, or 1 amino acid residues at the N- and/or C-terminus. In certain embodiments, the functional variant has at least 80%, 85%, 90%, 95%, 96%, 97%, 98%, or 99% sequence identity with SEQ ID NO: 507, and/or is a conservatively-substituted variant of SEQ ID NO: 507.

[0335] In certain embodiments, the IGHV3-23 signal peptide, or functional fragment or variant thereof, is encoded by a nucleic acid comprising SEQ ID NO: 508 or a functional fragment or variant thereof. In certain embodiments, the functional variant has at least 80%, 85%, 90%, 95%, 96%, 97%, 98%, or 99% sequence identity with SEQ ID NO: 508, hybridizes under stringent hybridization conditions with the complement of SEQ ID NO: 508, or is a codon degenerate variant of SEQ ID NO: 508.

[0336] In certain embodiments, the CAR is linked to an IGKV1-D33 signal peptide, or a functional fragment or variant thereof. In certain such embodiments, the IGKV1-D33 signal peptide has the amino acid sequence of SEQ ID NO: 509 or a functional fragment or variant thereof. In certain embodiments, the functional fragment is shorter than SEQ ID NO: 509 by at most 15, 10, 9, 8, 7, 6, 5, 4, 3, 2, or 1 amino acid residues at the N- and/or C-terminus. In certain embodiments, the functional variant has at least 80%, 85%, 90%, 95%, 96%, 97%, 98%, or 99% sequence identity with SEQ ID NO: 509, and/or is a conservatively-substituted variant of SEQ ID NO: 509.

[0337] In certain embodiments, the IGKV1-D33 signal peptide, or functional fragment or variant thereof, is encoded by a nucleic acid comprising SEQ ID NO: 510 or a functional fragment or variant thereof. In certain embodiments, the functional variant has at least 80%, 85%, 90%, 95%, 96%, 97%, 98%, or 99% sequence identity with SEQ ID NO: 510, hybridizes under stringent hybridization conditions with the complement of SEQ ID NO: 510, or is a codon degenerate variant of SEQ ID NO: 510.

[0338] In certain embodiments, the CAR is linked to an IGHV3-33 (L14F) signal peptide, or a functional fragment or variant thereof. In certain such embodiments, the IGHV3-33 (L14F) signal peptide has the amino acid sequence of SEQ ID NO: 511 or a functional fragment or variant thereof. In certain embodiments, the functional fragment is shorter than SEQ ID NO: 511 by at most 15, 10, 9, 8, 7, 6, 5, 4, 3, 2, or 1 amino acid residues at the N- and/or C-terminus. In certain embodiments, the functional variant has at least 80%, 85%, 90%, 95%, 96%, 97%, 98%, or 99% sequence identity with SEQ ID NO: 511, and/or is a conservatively-substituted variant of SEQ ID NO: 511.

[0339] In certain embodiments, the IGHV3-33 (L14F) signal peptide, or functional fragment or variant thereof, is encoded by a nucleic acid comprising SEQ ID NO: 512 or a functional fragment or variant thereof. In certain embodiments, the functional variant has at least 80%, 85%, 90%, 95%, 96%, 97%, 98%, or 99% sequence identity with SEQ ID NO: 512, hybridizes under stringent hybridization conditions with the complement of SEQ ID NO: 512, or is a codon degenerate variant of SEQ ID NO: 512.

[0340] In certain embodiments, the CAR is linked to an TVB2 (T21A) signal peptide, or a functional fragment or variant thereof. In certain such embodiments, the TVB2 (T21A) signal peptide has the amino acid sequence of SEQ ID NO: 513 or a functional fragment or variant thereof. In certain embodiments, the functional fragment is shorter than SEQ ID NO: 513 by at most 15, 10, 9, 8, 7, 6, 5, 4, 3, 2, or 1 amino acid residues at the N- and/or C-terminus. In certain embodiments, the functional variant has at least 80%, 85%, 90%, 95%, 96%, 97%, 98%, or 99% sequence identity with SEQ ID NO: 513, and/or is a conservatively-substituted variant of SEQ ID NO: 513.

[0341] In certain embodiments, the TVB2 (T21A) signal peptide, or functional fragment or variant thereof, is encoded by a nucleic acid comprising SEQ ID NO: 514 or a functional fragment or variant thereof. In certain embodiments, the functional variant has at least 80%, 85%, 90%, 95%, 96%, 97%, 98%, or 99% sequence identity with SEQ ID NO: 514, hybridizes under stringent hybridization conditions with the complement of SEQ ID NO: 514, or is a codon degenerate variant of SEQ ID NO: 514.

[0342] In certain embodiments, the CAR is linked to an CD52 signal peptide, or a functional fragment or variant thereof. In certain such embodiments, the CD52 signal peptide has the amino acid sequence of SEQ ID NO: 515 or a functional fragment or variant thereof. In certain embodiments, the functional fragment is shorter than SEQ ID NO: 515 by at most 15, 10, 9, 8, 7, 6, 5, 4, 3, 2, or 1 amino acid residues at the N- and/or C-terminus. In certain embodiments, the functional variant has at least 80%, 85%, 90%, 95%, 96%, 97%, 98%, or 99% sequence identity with SEQ ID NO: 515, and/or is a conservatively-substituted variant of SEQ ID NO: 515.

[0343] In certain embodiments, the CD52 signal peptide, or functional fragment or variant thereof, is encoded by a nucleic acid comprising SEQ ID NO: 516 or a functional fragment or variant thereof. In certain embodiments, the functional variant has at least 80%, 85%, 90%, 95%, 96%, 97%, 98%, or 99% sequence identity with SEQ ID NO: 516, hybridizes under stringent hybridization conditions with the complement of SEQ ID NO: 516, or is a codon degenerate variant of SEQ ID NO: 516.

[0344] In certain embodiments, the CAR is linked to an LNGFR signal peptide, or a functional fragment or variant thereof. In certain such embodiments, the LNGFR signal peptide has the amino acid sequence of SEQ ID NO: 517 or a functional fragment or variant thereof. In certain embodiments, the functional fragment is shorter than SEQ ID NO: 517 by at most 15, 10, 9, 8, 7, 6, 5, 4, 3, 2, or 1 amino acid residues at the N- and/or C-terminus. In certain embodiments, the functional variant has at least 80%, 85%, 90%, 95%, 96%, 97%, 98%, or 99% sequence identity with SEQ ID NO: 517, and/or is a conservatively-substituted variant of SEQ ID NO: 517.

[0345] In certain embodiments, the LNGFR signal peptide, or functional fragment or variant thereof, is encoded by a nucleic acid comprising SEQ ID NO: 518 or a functional fragment or variant thereof. In certain embodiments, the functional variant has at least 80%, 85%, 90%, 95%, 96%, 97%, 98%, or 99% sequence identity with SEQ ID NO: 518, hybridizes under stringent hybridization conditions with the complement of SEQ ID NO: 518, or is a codon degenerate variant of SEQ ID NO: 518.

[0346] F. Exemplary CAR Constructs

[0347] By way of example, but not limitation, the CAR can comprise an amino acid sequence having at least 80%, 85%, 90%, 95%, 96%, 97%, 98%, or 99% sequence identity with any one of SEQ ID NOs: 591, 593, 595, 597, 599, 601, 603, 605, 607, 609, 611, 613, 615, 617, 619, 621, 623, 625, 627, and 629 or a conservatively-substituted variant thereof. By way of further example, but not limitation, a polynucleotide encoding the CAR can comprise a nucleic acid sequence having at least 80%, 85%, 90%, 95%, 96%, 97%, 98%, or 99% sequence identity with the sequence of any one of SEQ ID NOs: 592, 594, 596, 598, 600, 602, 604, 606, 608, 610, 612, 614, 616, 618, 620, 622, 624, 626, 628, and 630; a sequence that hybridizes under stringent hybridization conditions with the complement of any one of such sequences; or a codon degenerate variant of any one of such sequences.

[0348] In certain embodiments, the CAR can comprise an amino acid sequence having at least 80%, 85%, 90%, 95%, 96%, 97%, 98%, or 99% sequence identity with SEQ ID NO: 623 or a conservatively-substituted variant thereof. In certain such embodiments, the polynucleotide encoding the CAR can comprise a nucleic acid sequence having at least 80%, 85%, 90%, 95%, 96%, 97%, 98%, or 99% sequence identity with the sequence of SEQ ID NO: 624; a sequence that hybridizes under stringent hybridization conditions with the complement of any one of such sequences; or a codon degenerate variant of any one of such sequences.

[0349] CARs and CAR construction as well as compositions are also described, for example, in:
[0350] Chimeric Antigen Receptor (CAR) T-Cell Therapies for Cancer: A Practical Guide, Edited by: Daniel W. Lee and Nirali N. Shah, 2020 (ISBN 978-0-323-66181-2; DOI https://doi.org/10.1016/C2017-0-04066-1);
[0351] Second Generation Cell and Gene-based Therapies, Biological Advances, Clinical Outcomes and Strategies for Capitalisation, Editors-in-Chief: Alain A. Vertés, Devyn M. Smith, Nathan J. Dowden, 2020 (ISBN 978-0-12-812034-7; DOI https://doi.org/10.1016/C2016-0-02070-3);
[0352] Basics of Chimeric Antigen Receptor (CAR) Immunotherapy, Author: Mumtaz Yaseen Balkhi, 2020 (ISBN 978-0-12-819573-4, DOI https://doi.org/10.1016/C2018-0-05356-6);
[0353] Engineering and Design of Chimeric Antigen Receptors, Authors: Sonia Guedan, Hugo Calderon, Avery D. Posey, Jr., and Marcela V. Maus, Molecular Therapy: Methods & Clinical Development, Vol. 12, March (2019) (https://www.cell.com/molecular-therapy-family/methods/pdf/S2329-0501(18)30133-5.pdf);
[0354] Chimeric Antigen Receptor T Cell Therapy Pipeline at a Glance: A Retrospective and Systematic Analysis from Clinicaltrials.Gov, Authors: Eider F Moreno Cortes, Caleb K Stein, Paula A Lengerke Diaz, Cesar A Ramirez-Segura, Januario E. Castro, MD, Blood (2019) 134 (Supplement_1): 5629 (https://doi.org/10.1182/blood-2019-132273);
[0355] WO2020209934 (PCT/US2020/017794)—Novel chimeric antigen receptors and libraries (MIT);
[0356] WO2020037142 (PCT/US2019/046691)—Compositions and methods for high-throughput activation screening to boost t cell effector function (Yale);
[0357] WO2015123642 (PCT/US2015/016057)—Chimeric antigen receptors and methods of making (Univ. TX);
[0358] WO2020014366 (PCT/US2019/041213)—Ror-1 specific chimeric antigen receptors and uses thereof (Precigen);
[0359] WO2019236577 (PCT/US2019/035384)—Muc16 specific chimeric antigen receptors and uses thereof (Precigen)
[0360] WO2019079486 (PCT/US2018/056334)—Polypeptide compositions comprising spacers (Precigen)
[0361] WO2017214333 (PCT/US2017/036440)—Cd33 specific chimeric antigen receptors (Precigen)

### V. Cytokine

[0362] In some embodiments, the modified immune effector cell of the present invention can comprise a cytokine. The cytokine may, for example, be encoded by the polynucleotide of the present disclosure. For example, the polynucleotide may encode the miRNA(s), CAR and cytokine, or the miRNA(s) and cytokine.

[0363] In some cases, the cytokine comprises at least one chemokine, interferon, interleukin, lymphokine, tumor necrosis factor, or variant or combination thereof. In certain embodiments, the cytokine is an interferon, GM-CSF, G-CSF, M-CSF, LT-beta, TNF-alpha, growth factors, hGH, and/or a ligand of human Toll-like receptors TLR1, TLR2, TLR3, TLR4, TLR5, TLR6, TLR7, TLR8, TLR9, TLR10, IFN-alpha, IFN-beta, or IFN-gamma.

[0364] In certain embodiments, the cytokine is an interleukin. In some cases the interleukin is IL-1, IL-2, IL-3, IL-4, IL-5, IL-6, IL-7, IL-8, IL-9, IL-10, IL-11, IL-12, IL-13, IL-14, IL-15, IL-16, IL-17, IL-18, IL-19, IL-20, IL-21, IL-22, IL-23, IL-24, IL-25, IL-26, IL-27, IL-28, IL-29, IL-30, IL-31, IL-32, IL-33, IL-35, or a functional variant or fragment thereof.

[0365] In certain embodiments, the cytokine may be IL-12, or a functional fragment or variant thereof. In some embodiments, the IL-12 is a single chain IL-12 (sclL-12), protease sensitive IL-12, destabilized IL-12, membrane bound IL-12, intercalated IL-12. In some instances, the IL-12 variants are as described in WO2015/095249, WO2016/048903, WO2017/062953.

[0366] In certain embodiments, the cytokine may be IL-15, or a functional fragment or variant thereof. In certain embodiments, the IL-15, or functional fragment or variant thereof, is membrane-bound. Such may occur when IL-15, or a functional fragment or variant thereof, is bound to membrane-bound IL-15Rα, or a functional fragment or variant thereof. Thus, certain embodiments of the present invention may involve a fusion protein comprising IL-15 and IL-15Rα, or their respective functional fragments or variants.

[0367] In certain embodiments, the IL-15, or functional fragment or variant thereof, comprises the amino acid sequence of SEQ ID NO: 519, or a functional fragment or variant thereof. In certain embodiments, the functional fragment is shorter than the amino acid sequence of SEQ ID NO: 519 by at most 30, 25, 20, 15, 10, 9, 8, 7, 6, 5, 4, 3, 2, or 1 amino acid residues at the N- and/or C-terminus. In certain embodiments, the functional variant has at least 80%, 85%, 90%, 95%, 96%, 97%, 98%, or 99% sequence identity with the amino acid sequence of SEQ ID NO: 519, and/or is a conservatively-substituted variant of the amino acid sequence of SEQ ID NO: 519.

[0368] In certain embodiments, the IL-15, or functional fragment or variant thereof, is encoded by a nucleic acid comprising the sequence of SEQ ID NO: 520, or a functional fragment or variant thereof. In certain embodiments, the functional variant has at least 80%, 85%, 90%, 95%, 96%, 97%, 98%, or 99% sequence identity with SEQ ID NO: 520, hybridizes under stringent hybridization conditions with the complement of SEQ ID NO: 520, or is a codon degenerate variant of SEQ ID NO: 520.

[0369] In certain embodiments, the IL-15Rα, or functional fragment or variant thereof, comprises the amino acid sequence of SEQ ID NO: 521 or a functional fragment or variant thereof. In certain embodiments, the functional fragment is shorter than the amino acid sequence of SEQ ID NO: 521 by at most 30, 25, 20, 15, 10, 9, 8, 7, 6, 5, 4, 3, 2, or 1 amino acid residues at the N- and/or C-terminus. In certain embodiments, the functional variant has at least 80%, 85%, 90%, 95%, 96%, 97%, 98%, or 99% sequence identity with the amino acid sequence of SEQ ID NO: 521, and/or is a conservatively-substituted variant of the amino acid sequence of SEQ ID NO: 521.

[0370] In certain embodiments, the IL-15Rα, or functional fragment or variant thereof, is encoded by a nucleic acid comprising SEQ ID NO: 522, or a functional fragment or variant thereof. In certain embodiments, the functional variant has at least 80%, 85%, 90%, 95%, 96%, 97%, 98%, or 99% sequence identity with SEQ ID NO: 522, hybridizes under stringent hybridization conditions with the complement of SEQ ID NO: 522, or is a codon degenerate variant of SEQ ID NO: 522.

[0371] In certain embodiments, the IL-15, or functional fragment or variant thereof, is linked to the IL-15Rα, or functional fragment thereof by way of a linker.

[0372] In certain embodiments, the linker comprises the amino acid sequence of SEQ ID NO: 529 or a functional fragment or variant thereof. In certain embodiments, the functional fragment is shorter than SEQ ID NO: 529 by at most 20, 15, 10, 9, 8, 7, 6, 5, 4, 3, 2, or 1 amino acid residues at the N- and/or C-terminus. In certain embodiments, the functional variant has at least 80%, 85%, 90%, 95%, 96%, 97%, 98%, or 99% sequence identity with SEQ ID NO: 529, and/or is a conservatively-substituted variant of SEQ ID NO: 529.

[0373] In certain embodiments, the linker is encoded by a nucleic acid comprising SEQ ID NO: 530 or a functional fragment or variant thereof. In certain embodiments, the functional variant has at least 80%, 85%, 90%, 95%, 96%, 97%, 98%, or 99% sequence identity with SEQ ID NO: 530, hybridizes under stringent hybridization conditions with SEQ ID NO: 530, or is a codon degenerate variant of SEQ ID NO: 530.

[0374] In certain embodiments, the fusion protein comprising IL-15 and IL-15Rα comprises the amino acid sequence of SEQ ID NO: 523 or a functional fragment or variant thereof. In certain embodiments, the functional fragment is shorter than the amino acid sequence of SEQ ID NO: 523 by at most 30, 25, 20, 15, 10, 9, 8, 7, 6, 5, 4, 3, 2, or 1 amino acid residues at the N- and/or C-terminus. In certain embodiments, the functional variant has at least 80%, 85%, 90%, 95%, 96%, 97%, 98%, or 99% sequence identity with the amino acid sequence of SEQ ID NO: 523, and/or is a conservatively-substituted variant of the amino acid sequence of SEQ ID NO: 523.

[0375] In certain embodiments, the fusion protein comprising IL-15 and IL-15Rα is encoded by a nucleic acid comprising SEQ ID NO: 524 or a functional fragment or variant thereof. In certain embodiments, the functional variant has at least 80%, 85%, 90%, 95%, 96%, 97%, 98%, or 99% sequence identity with SEQ ID NO: 524, hybridizes under stringent hybridization conditions with the complement of SEQ ID NO: 524, or is a codon degenerate variant of SEQ ID NO: 603.

[0376] In certain embodiments, the cytokine is linked to a signal peptide. Any signal for use in eukaryotic cells, including those described above for use with the CARs may be linked to the cytokine. In certain embodiments, the cytokine is linked to an IgE signal peptide.

[0377] In certain embodiments, the fusion protein comprising IL-15 and IL-15Rα comprises the amino acid sequence of SEQ ID NO: 525 or a functional fragment or variant thereof. In certain embodiments, the functional fragment is shorter than the amino acid sequence of SEQ ID NO: 525 by at most 30, 25, 20, 15, 10, 9, 8, 7, 6, 5, 4, 3, 2, or 1 amino acid residues at the N- and/or C-terminus. In certain embodiments, the functional variant has at least 80%, 85%, 90%, 95%, 96%, 97%, 98%, or 99% sequence identity with the amino acid sequence of SEQ ID NO: 525, and/or is a conservatively-substituted variant of the amino acid sequence of SEQ ID NO: 525.

[0378] In certain embodiments, the fusion protein comprising IL-15 and IL-15Rα is encoded by a nucleic acid comprising SEQ ID NO: 526 or a functional fragment or variant thereof. In certain embodiments, the functional variant has at least 80%, 85%, 90%, 95%, 96%, 97%, 98%, or 99% sequence identity with SEQ ID NO: 526, hybridizes under stringent hybridization conditions with the complement of SEQ ID NO: 526, or is a codon degenerate variant of SEQ ID NO: 526.

### VI. Cell Tag

[0379] In some embodiments, the modified immune effector cell of the present invention can comprise a cell tag. The cell tag may, for example, be encoded by the polynucleotide of the present disclosure. For example, the polynucleotide may encode the miRNA(s), CAR and/or cytokine described herein as well as a cell tag. In some aspects, the cell tag is used as a kill switch, selection marker, a biomarker, or a combination thereof.

[0380] In certain embodiments, the cell tag is capable of being bound by a predetermined binding partner. In certain such embodiments, the cell tag is non-immunogenic. In certain such embodiments, the cell tag comprises a polypeptide that is truncated so that it is non-immunogenic.

[0381] In certain embodiments, the administration of the predetermined binding partner allows for depletion of infused CAR-T cells. For example, the administration of cetuximab or any antibody that recognizes HER1 allows for the elimination of cells expressing a cell tag comprising truncated non-immunogenic HER1. The truncation of the HER1 sequence eliminates the potential for EGF ligand binding, homo- and hetero-dimerization of EGFR, and/or EGFR-mediated signaling while keeping cetuximab-binding ability intact (Ferguson, K., 2008. A structure-based view of Epidermal Growth Factor Receptor regulation. Annu Rev Biophys, Volume 37, pp. 353-373).

[0382] In certain embodiments, the cell tag comprises at least one of a truncated non-immunogenic HER1 polypeptide, a truncated non-immunogenic LNGFR polypeptide, a truncated non-immunogenic CD20 polypeptide, or a truncated non-immunogenic CD52 polypeptide, or a functional fragment or variant thereof.

[0383] In certain embodiments, the cell tag comprises a truncated non-immunogenic HER1 polypeptide comprising a HER1 Domain III and a truncated HER1 Domain IV. Such domains and the nucleic acid sequences encoding the same include those described in WO 2018/226897.

[0384] In certain embodiments, the HER1 Domain III comprises the amino acid sequence of SEQ ID NO: 604 or a functional fragment or variant thereof. In certain embodiments, the functional fragment is shorter than the amino acid sequence of SEQ ID NO: 565 by at most 30, 25, 20, 15, 10, 9, 8, 7, 6, 5, 4, 3, 2, or 1 amino acid residues at the N- and/or C-terminus. In certain embodiments, the functional variant has at least 80%, 85%, 90%, 95%, 96%, 97%, 98%, or 99% sequence identity with the amino acid sequence of SEQ ID NO: 565, and/or is a conservatively-substituted variant the amino acid sequence of sequence of SEQ ID NO: 565.

[0385] In certain embodiments, the HER1 Domain III, or functional fragment or variant thereof, is encoded by a nucleic acid comprising SEQ ID NO: 566 or a functional fragment or variant thereof. In certain embodiments, the functional variant has at least 80%, 85%, 90%, 95%, 96%, 97%, 98%, or 99% sequence identity with SEQ ID NO: 566, hybridizes under stringent hybridization conditions with the complement of SEQ ID NO: 566, or is a codon degenerate variant of SEQ ID NO: 566.

[0386] In certain embodiments, the truncated HER1 Domain IV comprises the amino acid sequence of SEQ ID NO: 567 or a functional fragment or variant thereof. In certain embodiments, the functional fragment is shorter than the amino acid sequence of SEQ ID NO: 567 by at most 30, 25, 20, 15, 10, 9, 8, 7, 6, 5, 4, 3, 2, or 1 amino acid residues at the N- and/or C-terminus. In certain embodiments, the functional variant has at least 80%, 85%, 90%, 95%, 96%, 97%, 98%, or 99% sequence identity with the amino acid sequence of SEQ ID NO: 567, and/or is a conservatively-substituted variant the amino acid sequence of sequence of SEQ ID NO: 567.

[0387] In certain embodiments, the truncated HER1 Domain IV, or functional fragment or variant thereof, is encoded by a nucleic acid comprising SEQ ID NO: 568 or a functional fragment or variant thereof. In certain embodiments, the functional variant has at least 80%, 85%, 90%, 95%, 96%, 97%, 98%, or 99% sequence identity with SEQ ID NO: 568, hybridizes under stringent hybridization conditions with the complement of SEQ ID NO: 568, or is a codon degenerate variant of SEQ ID NO: 568.

[0388] In certain such embodiments, the truncated non-immunogenic HER1 comprises the amino acid sequence of SEQ ID NO: 569 or a functional fragment or variant thereof. In certain embodiments, the functional fragment is shorter than the amino acid sequence of SEQ ID NO: 569 by at most 30, 25, 20, 15, 10, 9, 8, 7, 6, 5, 4, 3, 2, or 1 amino acid residues at the N- and/or C-terminus. In certain embodiments, the functional variant has at least 80%, 85%, 90%, 95%, 96%, 97%, 98%, or 99% sequence identity with the amino acid sequence of SEQ ID NO: 569, and/or is a conservatively-substituted variant the amino acid sequence of sequence of SEQ ID NO: 569.

[0389] In certain embodiments, the truncated non-immunogenic HER1, or functional fragment or variant thereof, is encoded by a nucleic acid comprising SEQ ID NO: 570 or a functional fragment or variant thereof. In certain embodiments, the functional variant has at least 80%, 85%, 90%, 95%, 96%, 97%, 98%, or 99% sequence identity with SEQ ID NO: 570, hybridizes under stringent hybridization conditions with the complement of SEQ ID NO: 570, or is a codon degenerate variant of SEQ ID NO: 570.

[0390] In certain embodiments, the cell tag comprises a truncated non-immunogenic CD20, or CD20t-1, or a functional fragment or variant thereof. In certain such embodiments, the cell tag comprises the amino acid sequence of SEQ ID NO: 573, SEQ ID NO: 575, or a functional fragment or variant thereof. In certain embodiments, the functional fragment is shorter than the amino acid sequences of SEQ ID NO: 573 or SEQ ID NO: 575 by at most 30, 25, 20, 15, 10, 9, 8, 7, 6, 5, 4, 3, 2, or 1 amino acid residues at the N- and/or C-terminus. In certain embodiments, the functional variant has at least 80%, 85%, 90%, 95%, 96%, 97%, 98%, or 99% sequence identity with SEQ ID NO: 573 or SEQ ID NO: 575, and/or is a conservatively-substituted variant of the amino acid sequence of SEQ ID NO: 573 or SEQ ID NO: 575.

[0391] In certain embodiments, the truncated non-immunogenic CD20, or CD20t-1, or functional fragment or variant thereof, is encoded by a nucleic acid comprising SEQ ID NO: 574 or SEQ ID NO: 576 or a functional fragment or variant thereof. In certain embodiments, the functional variant has at least 80%, 85%, 90%, 95%, 96%, 97%, 98%, or 99% sequence identity with SEQ ID NO: 574 or SEQ ID NO: 576, hybridizes under stringent hybridization conditions with the complement of SEQ ID NO: 574 or SEQ ID NO: 576, or is a codon degenerate variant of SEQ ID NO: 574 or SEQ ID NO: 576.

[0392] In certain embodiments, the cell tag further comprises a transmembrane domain. The transmembrane domain can be derived from either a natural or a synthetic source. Where the source is natural, the domain can, for example, be derived from any membrane-bound or transmembrane protein. Suitable transmembrane domains can include the transmembrane domain(s) of alpha, beta or zeta chain of the T-cell receptor; or a transmembrane domain from CD28, CD3 epsilon, CD3, CD45, CD4, CD5, CD8, CD9, CD16, CD22, CD33, CD37, CD64, CD80, CD86, CD134, CD137 or CD154, or a functional fragment or variant thereof. Alternatively, the transmembrane domain can be synthetic, and can comprise hydrophobic residues such as leucine and valine. In some embodiments, a triplet of phenylalanine, tryptophan and valine is found at one or both termini of a synthetic transmembrane domain.

[0393] In some embodiments, the transmembrane domain comprises a CD28 transmembrane domain, or a functional fragment or variant thereof. In certain such embodiments, the transmembrane domain comprises the amino acid sequence of SEQ ID NO: 477 or a functional fragment or variant thereof. In certain embodiments, the functional fragment is shorter than the amino acid sequence of SEQ ID NO: 477 by at most 25, 20, 15, 10, 9, 8, 7, 6, 5, 4, 3, 2, or 1 amino acid residues at the N- and/or C-terminus. In certain embodiments, the functional variant has at least 80%, 85%, 90%, 95%, 96%, 97%, 98%, or 99% sequence identity with the amino acid sequence of SEQ ID NO: 477, and/or is a conservatively-substituted variant of the amino acid sequence of SEQ ID NO: 477.

[0394] In certain embodiments, the CD28 transmembrane domain, or functional fragment or variant thereof, is encoded by a nucleic acid comprising SEQ ID NO: 478, or a functional fragment or variant thereof. In certain embodiments, the functional variant has at least 80%, 85%, 90%, 95%, 96%, 97%, 98%, or 99% sequence identity with SEQ ID NO: 478, hybridizes under stringent hybridization conditions with the complement of SEQ ID NO: 478, or is a codon degenerate variant of SEQ ID NO: 478.

[0395] In certain embodiments, the cell tag comprises a truncated HER1, or functional fragment or variant thereof, and a transmembrane domain, or a functional fragment or variant thereof. In some embodiments, the cell comprises the amino acid sequence of SEQ ID NO: 571 or a functional fragment or variant thereof. In certain embodiments, the functional fragment is shorter than the amino acid sequence of SEQ ID NO: 571 by at most 25, 20, 15, 10, 9, 8, 7, 6, 5, 4, 3, 2, or 1 amino acid residues at the N- and/or C-terminus. In certain embodiments, the functional variant has at least 80%, 85%, 90%, 95%, 96%, 97%, 98%, or 99% sequence identity with the amino acid sequence of SEQ ID NO: 571, and/or is a conservatively-substituted variant of the amino acid sequence of SEQ ID NO: 571.

[0396] In certain embodiments, the cell tag is encoded by a nucleic acid comprising SEQ ID NO: 572, or a functional fragment or variant thereof. In certain embodiments, the functional variant has at least 80%, 85%, 90%, 95%, 96%, 97%, 98%, or 99% sequence identity with SEQ ID NO: 572, hybridizes under stringent hybridization conditions with the complement of SEQ ID NO: 572, or is a codon degenerate variant of SEQ ID NO: 572.

[0397] In certain embodiments, the cell tag is linked with a signal peptide. The signal peptide can be any signal peptide suitable for use in a eukaryotic cell including those described with respect to CARs herein. In certain embodiments, the signal peptide is a Igic signal peptide comprising the amino acid sequence of SEQ ID NO: 491, or a functional fragment or variant thereof

### VII. Genetic Construct

[0398] As shown in FIG. 16, an exemplary polynucleotide is provided which can be used as template for the expression of various genes and other regulatory elements in cells. It should be understood that various elements can be included or omitted in the polynucleotide and that different options are shown for various exemplary sites in the polynucleotide.

[0399] As shown, the polynucleotide can include an integration signal for attP/attB phage integration of the polynucleotide into a bacterial genome. The polynucleotide can further include a 5′ homology arm or 5′ terminal repeat and a 3′ homology arm or 3′ terminal repeat. The polynucleotide can further include insulators, boundary elements and S/MAR positioned 3′ adjacent to the 5′ homology arm or 5′ terminal repeat and 5′ adjacent to the 3′ homology arm or 3′ terminal repeat. Between the insulators, boundary elements, or S/MAR, the polynucleotide can include, from 5′ to 3′, a promoter which can include a silencer, enhancer, TF binding modules and a core promoter; a 5′ untranslated region which can include stability modules, translation control elements, and intron-embedded elements such as miRNA encoding sequences; one or more genes which can include signal peptides, extracellular domains, transmembrane domains, signaling domains, antibody domains, peptide linkers, inteins and epitope tags; and a 3′ untranslated region that can include stability modules, translation control, 3′ end processing signals and a transcription terminator. It should be understood that the genes to be expressed can be separated by IRES, cleavage peptides, or ribosomal skipping peptides.

[0400] The CAR may be encoded in the same genetic construct with the miRNA, the cytokine, and/or the cell tag. An advantage of having two or more of such components expressed using one genetic construct is stoichiometric expression of such components.

[0401] A. Linkers

[0402] In certain embodiments, the polypeptides of the present invention (e.g., the CAR, the cytokine, and the cell tag) are linked by linker polypeptide(s). The linkers may also be used to link domains of a polypeptide (e.g., the VH and VL domains of a CAR, the truncated HER1 and transmembrane domains of the cell tag, and the IL-15 and IL-15Rα domains).

[0403] Linkers suitable in the present invention include flexible linkers, rigid linkers, and in vivo cleavable linkers. In some cases, the linker acts to link functional domains together (as in flexible and rigid linkers) or to release a free functional domain in vivo as in in vivo cleavable linkers.

[0404] As noted, in some cases, the linker sequence may include a flexible linker. Flexible linkers can be applied when a joined domain requires a certain degree of movement or interaction. Flexible linkers can be composed of small, non-polar (e.g., Gly) or polar (e.g., Ser or Thr) amino acids. A flexible linker can have sequences consisting primarily of stretches of Gly and Ser residues (“GS” linker). An example of a flexible linker can have the sequence of (Gly-Gly-Gly-Gly-Ser)n. By adjusting the copy number “n”, the length of this exemplary GS linker can be optimized to achieve appropriate separation of functional domains, or to maintain necessary inter-domain interactions. For example, (Gly-Gly-Gly-Gly-Ser)n, wherein n is 4 is a (G4S)4 linker as shown in SEQ ID NO: 608 or a conservatively substituted amino acid sequence thereof. Besides GS linkers, other flexible linkers can be utilized for recombinant fusion proteins. In some cases, flexible linkers can contain additional amino acids such as Thr and Ala to maintain flexibility. In other cases, polar amino acids such as Lys and Glu can be used to improve solubility.

[0405] Flexible linkers can be suitable choices when certain movements or interactions are desired for fusion protein domains. In addition, although flexible linkers do not have rigid structures, in some cases they can serve as a passive linker to keep a distance between functional domains. The length of a flexible linker may be adjusted to allow for proper folding or to achieve optimal biological activity of the fusion proteins.

[0406] A rigid linker can be utilized to maintain a fixed distance between domains of a polypeptide. Examples of rigid linkers include Alpha helix-forming linkers, Pro-rich sequence, (XP)n, X-Pro backbone, A(EAAAK)nA (n=2−5) (SEQ ID NO: 563) and functional fragments and variants thereof, to name a few. Rigid linkers can exhibit relatively stiff structures by adopting α-helical structures or by containing multiple Pro residues in some cases.

[0407] A linker useful in the present invention can be cleavable in some cases. In other cases, the linker is not cleavable. Linkers that are not cleavable can covalently join functional domains together to act as one molecule throughout an in vivo processes or an ex vivo process. A linker can also be cleavable in vivo. A cleavable linker can be introduced to release free functional domains in vivo.

[0408] A cleavable linker can be cleaved by the presence of reducing reagents, proteases, to name a few. For example, a reduction of a disulfide bond can be utilized to produce a cleavable linker. In the case of a disulfide linker, a cleavage event through disulfide exchange with a thiol, such as glutathione, could produce a cleavage. In some cases, a cleavable linker can allow for targeted cleavage. For example, an in vivo cleavage of a linker in a recombinant fusion protein can also be carried out by proteases that can be expressed in vivo under pathological conditions (e.g., cancer or inflammation), in specific cells or tissues, or constrained within certain cellular compartments. A cleavable linker can comprise a hydrazone, peptides, a disulfide, or a thioesther. For example, a hydrazone can confer serum stability. In other cases, a hydrazone can allow for cleavage in an acidic compartment. An acidic compartment can have a pH up to 7. A linker can also include a thioether. A thioether can be nonreducible A thioether can be designed for intracellular proteolytic degradation. Examples of cleavable linkers include Furinlink, fmdv, and 2A linkers (e.g., P2A, GSG-P2A, FP2A, T2A, and Furin-T2A), or functional fragments or variants thereof.

[0409] A fmdv linker may comprise the amino acid sequence of SEQ ID NO: 539 or a functional fragment or variant thereof. In certain embodiments, the functional fragment is shorter than the amino acid sequence of SEQ ID NO: 539 by at most 25, 20, 15, 10, 9, 8, 7, 6, 5, 4, 3, 2, or 1 amino acid residues at the N- and/or C-terminus. In certain embodiments, the functional variant has at least 80%, 85%, 90%, 95%, 96%, 97%, 98%, or 99% sequence identity with the amino acid sequence of SEQ ID NO: 539, and/or is a conservatively-substituted variant of the amino acid sequence of SEQ ID NO: 539.

[0410] In certain embodiments, the fmdv linker is encoded by a nucleic acid comprising SEQ ID NO: 540, or a functional fragment or variant thereof. In certain embodiments, the functional variant has at least 80%, 85%, 90%, 95%, 96%, 97%, 98%, or 99% sequence identity with SEQ ID NO: 540, hybridizes under stringent hybridization conditions with the complement of SEQ ID NO: 540, or is a codon degenerate variant of SEQ ID NO: 540.

[0411] A P2A linker may comprise the amino acid sequence of SEQ ID NO: 547 or a functional fragment or variant thereof. In certain embodiments, the functional fragment is shorter than the amino acid sequence of SEQ ID NO: 547 by at most 15, 10, 9, 8, 7, 6, 5, 4, 3, 2, or 1 amino acid residues at the N- and/or C-terminus. In certain embodiments, the functional variant has at least 80%, 85%, 90%, 95%, 96%, 97%, 98%, or 99% sequence identity with the amino acid sequence of SEQ ID NO: 547, and/or is a conservatively-substituted variant of the amino acid sequence of SEQ ID NO: 547.

[0412] In certain embodiments, the P2A linker is encoded by a nucleic acid comprising SEQ ID NO: 548, or a functional fragment or variant thereof. In certain embodiments, the functional variant has at least 80%, 85%, 90%, 95%, 96%, 97%, 98%, or 99% sequence identity with SEQ ID NO: 548, hybridizes under stringent hybridization conditions with the complement of SEQ ID NO: 548, or is a codon degenerate variant of SEQ ID NO: 548.

[0413] A GSG-P2A linker may comprise the amino acid sequence of SEQ ID NO: 549 or a functional fragment or variant thereof. In certain embodiments, the functional fragment is shorter than the amino acid sequence of SEQ ID NO: 549 by at most 20, 15, 10, 9, 8, 7, 6, 5, 4, 3, 2, or 1 amino acid residues at the N- and/or C-terminus. In certain embodiments, the functional variant has at least 80%, 85%, 90%, 95%, 96%, 97%, 98%, or 99% sequence identity with the amino acid sequence of SEQ ID NO: 549, and/or is a conservatively-substituted variant of the amino acid sequence of SEQ ID NO: 549.

[0414] In certain embodiments, the GSG-P2A linker is encoded by a nucleic acid comprising SEQ ID NO: 550, or a functional fragment or variant thereof. In certain embodiments, the functional variant has at least 80%, 85%, 90%, 95%, 96%, 97%, 98%, or 99% sequence identity with SEQ ID NO: 550, hybridizes under stringent hybridization conditions with the complement of SEQ ID NO: 550, or is a codon degenerate variant of SEQ ID NO: 550.

[0415] A FP2A linker may comprise the amino acid sequence of SEQ ID NO: 555 or a functional fragment or variant thereof. In certain embodiments, the functional fragment is shorter than the amino acid sequence of SEQ ID NO: 555 by at most 25, 20, 15, 10, 9, 8, 7, 6, 5, 4, 3, 2, or 1 amino acid residues at the N- and/or C-terminus. In certain embodiments, the functional variant has at least 80%, 85%, 90%, 95%, 96%, 97%, 98%, or 99% sequence identity with the amino acid sequence of SEQ ID NO: 555, and/or is a conservatively-substituted variant of the amino acid sequence of SEQ ID NO: 555.

[0416] In certain embodiments, the FP2A linker is encoded by a nucleic acid comprising SEQ ID NO: 556, or a functional fragment or variant thereof. In certain embodiments, the functional variant has at least 80%, 85%, 90%, 95%, 96%, 97%, 98%, or 99% sequence identity with SEQ ID NO: 556, hybridizes under stringent hybridization conditions with the complement of SEQ ID NO: 556, or is a codon degenerate variant of SEQ ID NO: 556.

[0417] A T2A linker may comprise the amino acid sequence of SEQ ID NO: 541 or a functional fragment or variant thereof. In certain embodiments, the functional fragment is shorter than the amino acid sequence of SEQ ID NO: 541 by at most 15, 10, 9, 8, 7, 6, 5, 4, 3, 2, or 1 amino acid residues at the N- and/or C-terminus. In certain embodiments, the functional variant has at least 80%, 85%, 90%, 95%, 96%, 97%, 98%, or 99% sequence identity with the amino acid sequence of SEQ ID NO: 541, and/or is a conservatively-substituted variant of the amino acid sequence of SEQ ID NO: 541.

[0418] In certain embodiments, the T2A linker is encoded by a nucleic acid comprising SEQ ID NO: 475428, or a functional fragment or variant thereof. In certain embodiments, the functional variant has at least 80%, 85%, 90%, 95%, 96%, 97%, 98%, or 99% sequence identity with SEQ ID NO: 542, hybridizes under stringent hybridization conditions with the complement of SEQ ID NO: 54, or is a codon degenerate variant of SEQ ID NO: 542.

[0419] In some embodiments, the linker comprises a furin polypeptide and a 2A polypeptide, wherein the furin polypeptide and the 2A polypeptide are connected by a polypeptide linker comprising at least three hydrophobic amino acids. Such linkers are called “Furin-T2A” linkers. In some cases, the at least three hydrophobic amino acids are selected from the list consisting of glycine (Gly)(G), alanine (Ala)(A), valine (Val)(V), leucine (Leu)(L), isoleucine (Ile)(I), proline (Pro)(P), phenylalanine (Phe)(F), methionine (Met)(M), tryptophan (Trp)(W). In some cases, the polypeptide linker can include one or more GS linker sequences, for instance (GS)n, (SG)n, and (GSG)n, wherein n can be any number from zero to thirty.

[0420] A Furin-T2A linker may comprise the amino acid sequence of SEQ ID NO: 543 or 545 or a functional fragment or variant thereof. In certain embodiments, the functional fragment is shorter than the amino acid sequence of SEQ ID NO: 543 or 545 by at most 25, 20, 15, 10, 9, 8, 7, 6, 5, 4, 3, 2, or 1 amino acid residues at the N- and/or C-terminus. In certain embodiments, the functional variant has at least 80%, 85%, 90%, 95%, 96%, 97%, 98%, or 99% sequence identity with the amino acid sequence of SEQ ID NO: 543 or 545, and/or is a conservatively-substituted variant of the amino acid sequence of SEQ ID NO: 543 or 545.

[0421] In certain embodiments, the Furin-T2A linker is encoded by a nucleic acid comprising SEQ ID NO: 544 or 546, or a functional fragment or variant thereof. In certain embodiments, the functional variant has at least 80%, 85%, 90%, 95%, 96%, 97%, 98%, or 99% sequence identity with SEQ ID NO: 544 or 546, hybridizes under stringent hybridization conditions with the complement of SEQ ID NO: 544 or 546, or is a codon degenerate variant of SEQ ID NO: 544 or 546.

[0422] A linker can be an engineered linker. For example, a linker can be designed to comprise chemical characteristics such as hydrophobicity. Methods of designing linkers can be computational. In some cases, computational methods can include graphic techniques. Computation methods can be used to search for suitable peptides from libraries of three-dimensional peptide structures derived from databases. For example, a Brookhaven Protein Data Bank (PDB) can be used to span the distance in space between selected amino acids of a linker.

[0423] Further exemplary linkers are provided in the Sequence Listing.

[0424] In some cases, at least two linker sequences can be included in the same protein. For example, polypeptides of interest within a fusion protein can be separated by at least two linkers. In some cases, polypeptides can be separated by 2, 3, 4, 5, 6, 7, 8, 9, or up to 10 linkers.

[0425] The CAR, cell tag, and/or cytokine of the present invention may be expressed as a fusion protein. In such embodiments, such components may be linked together using a self-cleaving peptide, for example a 2A peptide.

[0426] In certain embodiments, the self-cleaving peptide is a T2A peptide, or a functional fragment or variant thereof.

[0427] In certain embodiments, the self-cleaving peptide is a Furin-T2A peptide, or a functional fragment or variant thereof.

[0428] In certain such embodiments, the CAR, the cytokine, and the cell tag are expressed as a fusion protein with the CAR and the cytokine linked by a self-cleaving linker, for example one comprising Furin-T2A, and the cytokine and cell tag linked by a self-cleaving linker, for example one comprising T2A.

[0429] B. Promoters

[0430] The polynucleotide of the invention can be present in the construct in operable linkage with a promoter. Appropriate promoters can be selected based on the host cell and effect sought. Suitable promoters include constitutive and inducible promoters. The promoters can be tissue specific, such promoters being well known in the art.

[0431] Examples of constitutive promoters for use in the present invention include immediate early cytomegalovirus (CMV) promoter; human elongation growth factor 1 alpha 1 (hEF1A1); simian virus 40 (SV40) early promoter; mouse mammary tumor virus (MMTV); human immunodeficiency virus (HIV) long terminal repeat (LTR) promoter; MoMuLV promoter; avian leukemia virus promoter; Epstein-Barr virus immediate early promoter; Rous sarcoma virus promoter; and human gene promoters such as, but not limited to, the actin promoter, the myosin promoter, the hemoglobin promoter, and the creatine kinase promoter; and functional fragments and variants thereof.

[0432] In certain embodiments, the promoter is a hEF1A1 promoter. A hEF1A1 promoter may comprise the sequence of SEQ ID NO: 577, or a functional fragment or variant thereof. In certain embodiments, the functional variant has at least 80%, 85%, 90%, 95%, 96%, 97%, 98%, or 99% sequence identity with SEQ ID NO: 577, or hybridizes under stringent hybridization conditions with the complement of SEQ ID NO: 577. In certain embodiments, the promoter is a CMV promoter. A CMV promoter may comprise the sequence of SEQ ID NO: 578, or a functional fragment or variant thereof. In certain embodiments, the functional variant has at least 80%, 85%, 90%, 95%, 96%, 97%, 98%, or 99% sequence identity with SEQ ID NO: 578, or hybridizes under stringent hybridization conditions with the complement of SEQ ID NO: 578.

[0433] In contrast to constitutive promoters, the use of an inducible promoter provides a molecular switch capable of turning on the expression of the polynucleotide sequence which it is operatively linked when such expression is desired, or turning off the expression when expression is not desired. Examples of inducible promoters include, but are not limited to a metallothionine promoter, a glucocorticoid promoter, a progesterone promoter, and a tetracycline promoter. In one aspect, the inducible promoter can be a gene switch ligand inducible promoter. In some cases, an inducible promoter can be a small molecule ligand-inducible two polypeptide ecdysone receptor-based gene switch, such as a RHEOSWITCH® gene switch.

### VIII. Vectors and Delivery Systems

[0434] In certain embodiments, the polynucleotide of the present invention can be delivered to a target cell by any suitable delivery system, including non-viral and viral delivery systems. In some embodiments, a vector can include a polynucleotide of the present disclosure encoding the miRNA, CAR, cytokine, cell tag, or any combination thereof.

[0435] In certain cases, the miRNA(s), CAR, cytokine, and/or cell tag are expressed in separate vectors. In other aspects, the miRNA(s), CAR, cytokine, and/or cell tag are expressed from one single vector. In certain cases, the CAR and the miRNA(s) are expressed in separate vectors. In other aspects, the miRNA(s), CAR and cytokine are expressed from one single vector. In specific cases, the vectors can be lentiviral vectors, retroviral vectors, Sleeping Beauty transposons or vectors containing sequences for serine recombinase mediated integration. In some aspects, the vector is a plasmid, a mini-circle DNA or a nanoplasmid.

[0436] In certain embodiments, where the vector is a plasmid, mini-circle DNA or a nanoplasmid, the plasmid, mini-circle DNA or nanoplasmid can further include a bacterial origin of replication. In certain embodiments, the bacterial origin of replication can be from a ColE1 plasmid. In certain embodiments, the bacterial origin of replication comprises the sequence of SEQ ID NO: 579, or a functional fragment or variant thereof. In certain embodiments, the functional variant has at least 80%, 85%, 90%, 95%, 96%, 97%, 98%, or 99% sequence identity with SEQ ID NO: 579, or hybridizes under stringent hybridization conditions with the complement of SEQ ID NO: 579.

[0437] In order to assess the expression of one or more miRNA(s) and a CAR described herein or portions thereof, the expression vector to be introduced into a cell can also contain either a selectable marker gene or a reporter gene or both to facilitate identification and selection of expressing cells from the population of cells sought to be transfected or infected through viral vectors or non-viral vectors. In other aspects, the selectable marker can be carried on a separate piece of DNA and used in a co-transfection procedure. Both selectable markers and reporter genes can be flanked with appropriate regulatory sequences to enable expression in the host cells. Useful selectable markers include, for example, antibiotic-resistance genes, such as neomycin resistance gene (neo) and ampicillin resistance gene and the like. In some embodiments, a truncated epidermal growth factor receptor (HER1t or HER1t-1) tag can be used as a selectable marker gene.

[0438] Reporter genes can be used for identifying potentially transfected cells and for evaluating the functionality of regulatory sequences. In general, a reporter gene is a gene that is not present in or expressed by the recipient organism or tissue and that encodes a polypeptide whose expression is manifested by some easily detectable property, e.g., enzymatic activity. Expression of the reporter gene is assayed at a suitable time after the DNA has been introduced into the recipient cells. Suitable reporter genes include genes encoding luciferase, beta-galactosidase, chloramphenicol acetyl transferase, secreted alkaline phosphatase, or the green fluorescent protein gene (e.g., Ui-Tei et al., FEBS Letters 479: 79-82 (2000)). Suitable expression systems are well known and can be prepared using known techniques or obtained commercially. In general, the construct with the minimal 5′ flanking region showing the highest level of expression of reporter gene is identified as the promoter. Such promoter regions can be linked to a reporter gene and used to evaluate agents for the ability to modulate promoter-driven transcription.

[0439] In some embodiments, a viral vector described herein can comprise a hEF1A1 promoter to drive expression of transgenes, a bovine growth hormone polyA sequence to enhance transcription, a woodchuck hepatitis virus posttranscriptional regulatory element (WPRE), as well as LTR sequences derived from the pFUGW plasmid.

[0440] A. Methods for Introducing Nucleic Acids into Cells

[0441] Methods of introducing and expressing genes into a cell are well known. In the context of an expression vector, the vector can be readily introduced into a host cell, e.g., mammalian, bacterial, yeast, or insect cell by any method in the art. For example, the expression vector can be transferred into a host cell by physical, chemical, or biological means.

[0442] 1. Physical Methods

[0443] Physical methods for introducing a polynucleotide into a host cell, for instance an immune effector cell, include calcium phosphate precipitation, lipofection, particle bombardment, microinjection, electroporation, and the like. Methods for producing cells comprising vectors and/or exogenous nucleic acids are well-known in the art. See, for example, Sambrook et al. (Molecular Cloning: A Laboratory Manual, Cold Spring Harbor Laboratory, New York (2001)). In some embodiments, a method for the introduction of a polynucleotide into a host cell is calcium phosphate transfection or polyethylenimine (PEI) Transfection. In some embodiments, a method for introduction of a polynucleotide into a host cell is electroporation.

[0444] a. Electroporation (EP) Buffers

[0445] Various buffers can be used for electroporation. The buffers disclosed herein were found to have improved properties, including enhanced transfection capabilities, notwithstanding that these buffers comprise fewer components as compared to other known electroporation buffers.

[0446] Table 4 provides differing amounts of monobasic and dibasic phosphate used as buffering agents. Table 5 provides buffers 1-20 which contain buffering agents and glucose. Table Z provides buffers 21-37 which contain buffering agents and mannitol. Table 7 provides pH, conductivity, and osmolality for Buffers 1, 2 and 3 compared to a control buffer (Mirus Bio™ Ingenio™ electroporation solution, Catalog No. MIR-50117; Mirus Bio LLC, Madison, Wis., USA) (“Control 1”).

TABLE 4
Differing Amounts of Monobasic and Dibasic
Phosphate Used as a Buffering Agent

| 0.2M NaH₂PO₄ | 0.2M Na₂HPO₄ | |
|---|---|---|
| (mL) | (mL) | pH |
| 92.0 | 8.0 | 5.8 |
| 90.0 | 10.0 | 5.9 |
| 87.7 | 12.3 | 6.0 |
| 85.5 | 15.0 | 6.1 |
| 81.5 | 19.5 | 6.2 |
| 77.5 | 22.5 | 6.3 |
| 73.5 | 26.5 | 6.4 |
| 68.5 | 31.5 | 6.5 |
| 62.5 | 37.5 | 6.6 |
| 56.5 | 43.5 | 6.7 |
| 51.0 | 49.0 | 6.8 |
| 45.0 | 55.0 | 6.9 |
| 39.0 | 61.0 | 7.0 |
| 33.0 | 67.0 | 7.1 |
| 28.0 | 72.0 | 7.2 |
| 23.0 | 77.0 | 7.3 |
| 19.0 | 81.0 | 7.4 |
| 16.0 | 84.0 | 7.5 |
| 13.0 | 87.0 | 7.6 |
| 10.5 | 89.5 | 7.7 |
| 8.5 | 91.5 | 7.8 |

TABLE 5
Buffers 1 through 20 - Buffering Agents and Glucose

| | | | Na₂HPO₄/ | | | |
|---|---|---|---|---|---|---|
| Sample | Glucose | HEPES | NaH₂PO₄ | KCl | MgCl₂ | DMSO |
| No. | (mM) | (mM) | (mM) | (mM) | (mM) | (%) |
| 1 | 30 | 5 | 105 | 10 | 20 | 0 |
| 2 | 31 | 0 | 90 | 5 | 15 | 0 |
| 3 | 30 | 10 | 90 | 5 | 15 | 0 |
| 4 | 25 | 10 | 120 | 15 | 25 | 0 |
| 5 | 30 | 25 | 50 | 2 | 10.5 | 5 |
| 6 | 0 | 5 | 160 | 10 | 10.5 | 0 |
| 7 | 0 | 5 | 160 | 2 | 20 | 5 |
| 8 | 15 | 25 | 160 | 10 | 20 | 5 |
| 9 | 30 | 5 | 160 | 2 | 1 | 2.5 |
| 10 | 15 | 15 | 105 | 6 | 10.5 | 2.5 |
| 11 | 30 | 25 | 50 | 10 | 1 | 0 |
| 12 | 30 | 5 | 50 | 6 | 20 | 5 |
| 13 | 30 | 15 | 160 | 10 | 1 | 5 |
| 14 | 15 | 5 | 50 | 2 | 1 | 0 |
| 15 | 0 | 5 | 50 | 10 | 1 | 5 |
| 16 | 0 | 25 | 50 | 10 | 20 | 2.5 |
| 17 | 30 | 25 | 160 | 2 | 20 | 0 |
| 18 | 0 | 15 | 50 | 2 | 20 | 0 |
| 19 | 0 | 25 | 160 | 6 | 1 | 0 |
| 20 | 0 | 25 | 105 | 2 | 1 | 5 |

TABLE 6
Buffers 21 through 37 - Buffering Agents and Mannitol

| | | | Na₂HPO₄/ | | | |
|---|---|---|---|---|---|---|
| Sample | Mannitol | HEPES | NaH₂PO₄ | KCl | MgCl₂ | DMSO |
| No. | (mM) | (mM) | (mM) | (mM) | (mM) | (%) |
| 21 | 5 | 25 | 160 | 6 | 1 | 0 |
| 22 | 150 | 25 | 50 | 2 | 10.5 | 5 |
| 23 | 5 | 15 | 50 | 2 | 20 | 0 |
| 24 | 150 | 25 | 50 | 10 | 1 | 0 |
| 25 | 5 | 25 | 105 | 2 | 1 | 5 |
| 26 | 77.5 | 5 | 50 | 2 | 1 | 0 |
| 27 | 150 | 5 | 160 | 2 | 1 | 2.5 |
| 28 | 150 | 15 | 160 | 10 | 1 | 5 |
| 29 | 5 | 5 | 50 | 10 | 1 | 5 |
| 30 | 150 | 25 | 160 | 2 | 20 | 0 |
| 31 | 150 | 5 | 105 | 10 | 20 | 0 |
| 32 | 77.5 | 15 | 105 | 6 | 10.5 | 2.5 |
| 33 | 77.5 | 25 | 160 | 10 | 20 | 5 |
| 34 | 150 | 5 | 50 | 6 | 20 | 5 |
| 35 | 5 | 25 | 50 | 10 | 20 | 2.5 |
| 36 | 5 | 5 | 160 | 10 | 10.5 | 0 |
| 37 | 5 | 5 | 160 | 2 | 20 | 5 |

TABLE 7
Composition, pH, Conductivity, and Osmolality
of Buffers 1, 2, and 3 Compared to Control 1

| | | | Na2HPO4/ | | | | | osm |
|---|---|---|---|---|---|---|---|---|
| Sample | Glucose | HEPES | NaH2PO4 | KCl | MgCl2 | | Conductivity | (mOsm/ |
| No. | (mM) | (mM) | (mM) | (mM) | (mM) | pH | (ms/cm) | kgH20) |
| 1 | 30 | 5 | 105 | 10 | 20 | 7.0 | 14.3 | 340 |
| 2 | 31 | 0 | 90 | 5 | 15 | 7.1 | 11.6 | 280 |
| 3 | 30 | 10 | 90 | 5 | 15 | 7.1 | 12.8 | 292 |
| Control 1 | X | X | | | | 7.3 | 16.9 | 575 |

[0447] In some embodiments, the buffer comprises a solvent, such as water. In some embodiments, the water may be purified and/or sterilized. For example, the water may be subjected to deionization (e.g., capacitive deionization or electrodeionization), reverse osmosis, carbon filtering, microfiltration, ultrafiltration, and/or ultraviolet sterilization. In some embodiments, the water is deionized. In some embodiments, the water is of a quality designated as “water for injection”; also known as “sterile water for injection.” Water for injection is generally made by distillation or reverse osmosis. Water for injection is a sterile, nonpyrogenic, solute-free preparation of water, chemically designated “H2O,” and having a pH of between about 5.0 and about 7.0, preferably about 5.5.

[0448] In some embodiments, the solvent comprises between 0.1% and 99.9% by volume of the total buffer volume. For example, the solvent may comprise at least about 0.1%, 1%, 5%, 10%, 15%, 20%, 25%, 30%, 35%, 40%, 45%, 50%, 55%, 60%, 65%, 70%, 75%, 80%, 85%, 90%, 95%, 99%, or 99.1% by volume of the total buffer volume.

[0449] In some embodiments, the buffer comprises a solute, for example a sugar or an organic compound derived from sugar, for example a sugar alcohol. In embodiments wherein the buffer comprises a sugar, the sugar may comprise a monosaccharide, a disaccharide, and/or a polysaccharide. In some embodiments, the sugar comprises a monosaccharide, for example glucose, fructose, and/or galactose. In some embodiments, the sugar comprises a disaccharide, for example sucrose, lactose, and maltose. In some embodiments, the sugar comprises a polysaccharide, for example cellulose or starch. In embodiments wherein the buffer comprises a sugar alcohol, the sugar alcohol may comprise mannitol, sorbitol, xylitol, lactitol, isomalt, maltitol, and/or hydrogenated starch hydrolysates (HSH).

[0450] In some embodiments, the sugar is present in an amount less than about 50 millimolar (mM). For example, the sugar may be present in an amount less than about 45 mM, 40 mM, 35 mM, 30 mM, 25 mM, 20 mM, 15 mM, 10 mM, or 5 mM. In some embodiments, the sugar is present in an amount that ranges between about 10 mM and about 50 mM, about 10 mM and about 40 mM, about 10 mM and about 20 mM, or about 25 mM and about 35 mM. In some embodiments, the sugar is present in an amount of about 25 mM, 26 mM, 27 mM, 28 mM, 29 mM, 30 mM, 31 mM, 32 mM, 33 mM, 34 mM, or 35 mM.

[0451] In some embodiments, the sugar is glucose. In these embodiments, the glucose may be present in an amount less than about 50 millimolar (mM). For example, the glucose may be present in an amount less than about 45 mM, 40 mM, 35 mM, 30 mM, 25 mM, 20 mM, 15 mM, 10 mM, or 5 mM. In some embodiments, the glucose is present in an amount that ranges between about 10 mM and about 50 mM, about 10 mM and about 40 mM, about 10 mM and about 20 mM, or about 25 mM and about 35 mM. In some embodiments, the glucose is present in an amount of about 25 mM, 26 mM, 27 mM, 28 mM, 29 mM, 30 mM, 31 mM, 32 mM, 33 mM, 34 mM, or 35 mM. In certain embodiments, the glucose is present in an amount of about 30 mM or 31 mM.

[0452] In some embodiments, the sugar is mannitol. In these embodiments, the mannitol may be present in an amount less than about 50 millimolar (mM). For example, the mannitol may be present in an amount less than about 45 mM, 40 mM, 35 mM, 30 mM, 25 mM, 20 mM, 15 mM, 10 mM, or 5 mM. In some embodiments, the mannitol is present in an amount that ranges between about 10 mM and about 50 mM, about 10 mM and about 40 mM, about 10 mM and about 20 mM, or about 25 mM and about 35 mM. In some embodiments, the mannitol is present in an amount of about 25 mM, 26 mM, 27 mM, 28 mM, 29 mM, 30 mM, 31 mM, 32 mM, 33 mM, 34 mM, or 35 mM.

[0453] In some embodiments, the EP buffer comprises one or more chloride salts, for example potassium chloride (KCl) and/or magnesium chloride (MgCl₂). In some embodiments, the buffer further comprises one or more buffering agents, for example, Na₂HPO₄, NaH₂PO₄, or Na₂HPO₄/NaH₂PO₄. In some embodiments, the buffer further comprises one or more of HEPES and/or DMSO. In other embodiments, the buffer specifically excludes one or more buffering agents commonly found in commercial electroporation (EP) buffers. For example, in some embodiments, the buffer excludes one or both of DMSO and/or HEPES.

[0454] In some embodiments, the buffer comprises water (H₂O), glucose, KCl, MgCl₂, and Na₂HPO₄/NaH₂PO₄. In some embodiments, the buffer comprises water (H₂O), glucose, KCl, MgCl₂, Na₂HPO₄/NaH₂PO₄, and HEPES. In other embodiments, the buffer comprises water (H₂O), glucose, KCl, MgCl₂, Na₂HPO₄/NaH₂PO₄, HEPES, and DMSO.

[0455] In some embodiments, the buffer consists essentially of water (H₂O), glucose, KCl, MgCl₂, and Na₂HPO₄/NaH₂PO₄. In some embodiments, the buffer consists essentially of water (H₂O), glucose, KCl, MgCl₂, Na₂HPO₄/NaH₂PO₄, and HEPES. In other embodiments, the buffer consists essentially of water (H₂O), glucose, KCl, MgCl₂, Na₂HPO₄/NaH₂PO₄, HEPES, and DMSO.

[0456] In some embodiments, the buffer consists of water (H₂O), glucose, KCl, MgCl₂, and Na₂HPO₄/NaH₂PO₄. In some embodiments, the buffer consists of water (H₂O), glucose, KCl, MgCl₂, Na₂HPO₄/NaH₂PO₄, and HEPES. In other embodiments, the buffer consists of water (H₂O), glucose, KCl, MgCl₂, Na₂HPO₄/NaH₂PO₄, HEPES, and DMSO.

[0457] In some embodiments, the buffering agent has a pH ranging from about 6.0 to 8.0, 6.5 to 8.0, 7.0 to 8.0, 7.5 to 8.0, 6.0 to 7.5, 6.0 to 7.0, 6.0 to 6.5, 6.5 to 7.5, or 6.5 to 7.0. In some embodiments, the buffering agent has a pH of about 6.5, 6.6, 6.7, 6.8, 6.9, 7.0, 7.1, 7.2, 7.3, 7.4, 7.5, 7.6, 7.7, 7.8, 7.9, or 8.0.

[0458] In some embodiments, the buffer comprising the one or more buffering agents has a pH ranging from about 6.0 to 8.0, 6.5 to 8.0, 7.0 to 8.0, 7.5 to 8.0, 6.0 to 7.5, 6.0 to 7.0, 6.0 to 6.5, 6.5 to 7.5, or 6.5 to 7.0. In some embodiments, the buffer has a pH of about 6.5, 6.6, 6.7, 6.8, 6.9, 7.0, 7.1, 7.2, 7.3, 7.4, 7.5, 7.6, 7.7, 7.8, 7.9, or 8.0.

[0459] In some embodiments, the buffer comprises one or both of Na₂HPO₄ and/or NaH₂PO₄. In embodiments wherein the buffer comprises both buffering agents, the ratio of the two (i.e., Na₂HPO₄/NaH₂PO₄) may be about 1:1, 1:2, 1:3, 1:4, 1:5, 1:6, 1:7, 1:8, 1:9, 9:1, 8:1, 7:1, 6:1 5:1, 4:1, 3:1, 2:1, or 2:3. In some embodiments, the ratio of Na₂HPO₄/NaH₂PO₄ has a pH of 6.5, 6.6, 6.7, 6.8, 6.9, 7.0, 7.1, 7.2, 7.3, 7.4, 7.5, 7.6, 7.7, 7.8, or 7.9.

[0460] In some embodiments, a mixture of Na₂HPO₄ and NaH₂PO₄ (also referred to “Na₂HPO₄/NaH₂PO₄” or “sodium phosphate”) may be present in the buffer in an amount ranging from about 50 mM and 160 mM, 60 mM to 150 mM, 70 mM to 140 mM, 75 mM to 130 mM, 80 mM to 125 mM, 90 mM to 125 mM, 90 mM to 120 mM, 90 mM to 115 mM, or 90 mM to 105 mM. In some embodiments, the Na₂HPO₄/NaH₂PO₄ is present in an amount of at least 50 mM, 60 mM, 70 mM, 80 mM, 90 mM, or 100 mM. In some embodiments, the Na₂HPO₄/NaH₂PO₄ is present in an amount of 80 mM, 81 mM, 82 mM, 83 mM, 84 mM, 85 mM, 86 mM, 87 mM, 88 mM, 89 mM, 90 mM, 91 mM, 92 mM, 93 mM, 94 mM, 95 mM, 96 mM, 97 mM, 98 mM, 99 mM, 100 mM, 101 mM, 102 mM, 103 mM, 104 mM, 105 mM, 106 mM, 107 mM, 108 mM, 109 mM, 110 mM, 111 mM, 112 mM, 113 mM, 114 mM, 115 mM, 116 mM, 117 mM, 118 mM, 119 mM, or 120 mM. In certain embodiments, the Na₂HPO₄/NaH₂PO₄ is present in an amount of 90 mM or 105 mM.

[0461] In embodiments wherein the buffer comprises KCl, the KCl may be present in an amount less than about 30 mM. For example, the KCl may be present in an amount less than about 25 mM, 20 mM, 15 mM, 10 mM, or 5 mM. In some embodiments, the KCl is present in an amount that ranges between about 1 mM and about 30 mM, about 2 mM and about 25 mM, about 3 mM and about 20 mM, about 4 mM and about 15 mM, about 5 mM and about 10 mM, or about 5 mM to about 15 mM. In some embodiments, the KCl is present in an amount of about 1 mM, 2 mM, 3 mM, 4 mM, 5 mM, 6 mM, 7 mM, 8 mM, 9 mM, 10 mM, 11 mM, 12 mM, 13 mM, 14 mM, or 15 mM. In certain embodiments, the KCl is present in an amount of about 5 mM or 10 mM. In some embodiments, the KCl has a pH of about 6.5, 6.6, 6.7, 6.8, 6.9, 7.0, 7.1, 7.2, 7.3, 7.4, 7.5, 7.6, 7.7, 7.8, or 7.9.

[0462] In embodiments wherein the buffer comprises MgCl₂, the MgCl₂ may be present in an amount less than about 50 mM. For example, the MgCl₂ may be present in an amount less than about 45 mM, 35 mM, 30 mM 25 mM, 20 mM, 15 mM, 10 mM, or 5 mM. In some embodiments, the MgCl₂ is present in an amount that ranges between about 5 mM and about 50 mM, about 6 mM and about 45 mM, about 7 mM and about 40 mM, about 8 mM and about 35 mM, about 9 mM and about 30 mM, about 10 mM and about 25 mM, or about 15 mM and about 25 mM. In some embodiments, the MgCl₂ is present in an amount of about 5 mM, 6 mM, 7 mM, 8 mM, 9 mM, 10 mM, 11 mM, 12 mM, 13 mM, 14 mM, 15 mM, 16 mM, 17 mM, 18 mM, 19 mM, 20 mM, 21 mM, 22 mM, 23 mM, 24 mM, 25 mM, 26 mM, 27 mM, 28 mM, 29 mM, or 30 mM. In certain embodiments, the MgCl₂ is present in an amount of about 15 mM or 20 mM. In some embodiments, the MgCl₂ has a pH of about 6.5, 6.6, 6.7, 6.8, 6.9, 7.0, 7.1, 7.2, 7.3, 7.4, 7.5, 7.6, 7.7, 7.8, or 7.9.

[0463] In embodiments wherein the buffer comprises HEPES, the HEPES may be present in an amount less than about 30 mM. For example, the HEPES may be present in an amount less than about 25 mM, 20 mM, 15 mM, 10 mM, 5 mM, 4 mM, 3 mM, 2 mM, 1 mM, 0.5 mM, or 0.1 mM. In some embodiments, the HEPES is present in an amount that ranges between about 1 mM and about 30 mM, about 2 mM and about 25 mM, about 3 mM and about 20 mM, about 4 mM and about 15 mM, about 5 mM and about 10 mM. In some embodiments, the HEPES is present in an amount of about 0.1 mM, 0.5 mM, 1 mM, 2 mM, 3 mM, 4 mM, 5 mM, 6 mM, 7 mM, 8 mM, 9 mM, 10 mM, 11 mM, 12 mM, 13 mM, 14 mM, or 15 mM. In certain embodiments, the HEPES is present in an amount of 0 mM, 5 mM, or 10 mM. In some embodiments, the HEPES has a pH of about 6.5, 6.6, 6.7, 6.8, 6.9, 7.0, 7.1, 7.2, 7.3, 7.4, 7.5, 7.6, 7.7, 7.8, or 7.9.

[0464] In embodiments wherein the buffer comprises DMSO, the DMSO may be present in an amount equal to or less than 5%, 4%, 3%, 2%, 1%, 0.9%, 0.8%, 0.7%, 0.6%, 0.5%, 0.4%, 0.3%, 0.2%, or 0.1% by volume of the total buffer volume. In some embodiments, DMSO is present from about 0% to about 2.5% by volume of the total buffer volume. In some embodiments, DMSO is present in an amount ranging from about 0.1% to 5%, 1% to 5%, 2% to 5%, 3% to 5%, or 4% to 5% by volume of the total buffer volume. In some embodiments, the DMSO has a pH of about 6.5, 6.6, 6.7, 6.8, 6.9, 7.0, 7.1, 7.2, 7.3, 7.4, 7.5, 7.6, 7.7, 7.8, or 7.9. In other embodiments, DMSO is not included in the buffer at all.

[0465] In certain embodiments, the buffer comprises a sugar in an amount equal to or less than 50 mM; HEPES in an amount equal to or less than 25 mM; Na₂HPO₄/NaH₂PO₄ in an amount equal to or less than 160 mM; KCl in an amount equal to or less than 10 mM; MgCl₂ in an amount equal to or less than 20 mM; and DMSO in an amount equal to or less than 5% by volume of the total buffer volume. In some of these embodiments, the sugar may comprise a monosaccharide and/or a sugar alcohol. In some of these embodiments, the sugar is mannitol and/or glucose. In some of these embodiments, the sugar is glucose. In some embodiments, the buffer does not comprise DMSO.

[0466] In certain embodiments, the buffer comprises a sugar in an amount of at least about 15 mM; HEPES in an amount equal to or less than 25 mM; Na₂HPO₄/NaH₂PO₄ in an amount of at least about 90 mM; KCl in an amount of at least about 2 mM; MgCl₂ in an amount of at least 15 mM; and DMSO in an amount equal to or less than 5% by volume of the total buffer volume. In some of these embodiments, the sugar may comprise a monosaccharide and/or a sugar alcohol. In some of these embodiments, the sugar is mannitol and/or glucose. In some of these embodiments, the sugar is glucose. In some embodiments, the buffer does not comprise DMSO.

[0467] In certain embodiments, the buffer comprises a sugar in an amount ranging from about 15 mM to about 35 mM; KCl in an amount ranging from about 5 mM to about 10 mM; MgCl₂ in an amount ranging from about 10.5 mM to about 20 mM; Na₂HPO₄/NaH₂PO₄ in an amount ranging from about 90 mM to about 105 mM; HEPES in an amount equal to or less than 25 mM; and DMSO in an amount equal to or less than 5% by volume of the total buffer volume. In some of these embodiments, the sugar may comprise a monosaccharide and/or a sugar alcohol. In some of these embodiments, the sugar is mannitol and/or glucose. In some of these embodiments, the sugar is glucose. In some embodiments, the buffer does not comprise DMSO.

[0468] In certain embodiments, the buffer comprises glucose in an amount of about 15 mM; KCl in an amount of about 6 mM; MgCl₂ in an amount of about 10.5 mM Na₂HPO₄/NaH₂PO₄ in an amount of about 105 mM; HEPES in an amount ranging from about 15 mM; and DMSO in an amount of about 2.5% by volume of total buffer volume.

[0469] In certain embodiments, the buffer comprises glucose in an amount of about 30 mM; KCl in an amount of about 10 mM; MgCl₂ in an amount of about 20 mM; Na₂HPO₄/NaH₂PO₄ in an amount of about 105 mM; and HEPES in an amount of about 5 mM. In some embodiments, DMSO is specifically excluded from the buffer.

[0470] In certain embodiments, the buffer comprises glucose in an amount of about 31 mM; KCl in an amount of about 5 mM; and MgCl₂ in an amount of about 15 mM; and Na₂HPO₄/NaH₂PO₄ in an amount of about 90 mM. In some embodiments, one or more of HEPES and DMSO is/are specifically excluded from the buffer.

[0471] In certain embodiments, the buffer comprises glucose in an amount of about 30 mM; KCl in an amount of about 5 mM; and MgCl₂ in an amount of about 15 mM; Na₂HPO₄/NaH₂PO₄ in an amount of about 90 mM; and HEPES in an amount of about 10 mM. In some embodiments, DMSO is specifically excluded from the buffer.

[0472] In certain embodiments, the buffer comprises glucose in an amount of about 25 mM; KCl in an amount of about 15 mM; and MgCl₂ in an amount of about 25 mM; Na₂HPO₄/NaH₂PO₄ in an amount of about 120 mM; and HEPES in an amount of about 10 mM. In some embodiments, DMSO is specifically excluded from the buffer.

[0473] In certain embodiments, the pH of the buffer may be adjusted. In some embodiments, the buffer is adjusted to a pH of between 6.5 and 8. In some embodiments, the buffer is adjusted to a pH between about 7.0 and 7.6. In some embodiments, the buffer is adjusted to a pH between about 6.9 and 7.2, or between about 7.0 and 7.1. In some embodiments, the buffer is adjusted to a pH of about 6.5, 6.6, 6.7, 6.8, 6.9, 7.0, 7.1, 7.2, 7.3, 7.4, 7.5, 7.6, 7.7, 7.8, 7.9, or 8.0. In certain embodiments, the buffer is adjusted to a pH of about 7.0 or 7.1.

[0474] In certain embodiments, the conductivity of the buffer is between about 7.0 ms/cm to about 16.0 ms/cm, about 9.0 ms/cm to about 16.0 ms/cm, about 11.0 ms/cm to about 16.0 ms/cm, or about 13.0 ms/cm to about 16.0 ms/cm. In some embodiments, the conductivity of the buffer is between about 7.0 ms/cm to about 15.0 ms/cm, about 9.0 ms/cm to about 15.0 ms/cm, about 11.0 ms/cm to about 15.0 ms/cm, or about 13.0 ms/cm to about 15.0 ms/cm. In some embodiments, the conductivity of the buffer is about 7.0 ms/cm, about 7.1 ms/cm, about 7.2 ms/cm, about 7.3 ms/cm, about 7.4 ms/cm, about 7.5 ms/cm, about 7.6 ms/cm, about 7.7 ms/cm, about 7.8 ms/cm, about 7.9 ms/cm, about 8.0 ms/cm, about 8.1 ms/cm, about 8.2 ms/cm, about 8.3 ms/cm, about 8.4 ms/cm, about 8.5 ms/cm, about 8.6 ms/cm, about 8.7 ms/cm, about 8.8 ms/cm, about 8.9 ms/cm, about 9.0 ms/cm, about 9.1 ms/cm, about 9.2 ms/cm, about 9.3 ms/cm, about 9.4 ms/cm, about 9.5 ms/cm, about 9.6 ms/cm, about 9.7 ms/cm, about 9.8 ms/cm, about 9.9 ms/cm, about 10.0 ms/cm, about 10.1 ms/cm, about 10.2 ms/cm, about 10.3 ms/cm, about 10.4 ms/cm, about 10.5 ms/cm, about 10.6 ms/cm, about 10.7 ms/cm, about 10.8 ms/cm, about 10.9 ms/cm, about 11.0 ms/cm, about 11.1 ms/cm, about 11.2 ms/cm, about 11.3 ms/cm, about 11.4 ms/cm, about 11.5 ms/cm, about 11.6 ms/cm, about 11.7 ms/cm, about 11.8 ms/cm, about 11.9 ms/cm, about 12.0 ms/cm, about 12.1 ms/cm, about 12.2 ms/cm, about 12.3 ms/cm, about 12.4 ms/cm, about 12.5 ms/cm, about 12.6 ms/cm, about 12.7 ms/cm, about 12.8 ms/cm, about 12.9 ms/cm, about 13.0 ms/cm, about 13.1 ms/cm, about 13.2 ms/cm, about 13.3 ms/cm, about 13.4 ms/cm, about 13.5 ms/cm, about 13.6 ms/cm, about 13.7 ms/cm, about 13.8 ms/cm, about 13.9 ms/cm, about 14.0 ms/cm, about 14.1 ms/cm, about 14.2 ms/cm, about 14.3 ms/cm, about 14.4 ms/cm, about 14.5 ms/cm, about 14.6 ms/cm, about 14.7 ms/cm, about 14.8 ms/cm, about 14.9 ms/cm, about 15.0 ms/cm, about 15.1 ms/cm, about 15.2 ms/cm, about 15.3 ms/cm, about 15.4 ms/cm, about 15.5 ms/cm, about 15.6 ms/cm, about 15.7 ms/cm, about 15.8 ms/cm, about 15.9 ms/cm, or about 16.0 ms/cm. In certain embodiments, the conductivity of the buffer is about 11.6, 12.8, or 14.3.

[0475] In some embodiments, the osmolality of the buffer is lower than the osmolality of the cells being transfected (i.e., also known as “intracellular osmolality”). In some embodiments, the osmolality of the buffer ranges from about 250 mOsm/kg H₂O to about 1255 mOsm/kg H₂O, about 250 mOsm/kg H₂O to about 1100 mOsm/kg H₂O, about 250 mOsm/kg H₂O to about 900 mOsm/kg H₂O, about 250 mOsm/kg H₂O to about 700 mOsm/kg H₂O, about 250 mOsm/kg H₂O to about 500 mOsm/kg H₂O, about 250 mOsm/kg H₂O to about 400 mOsm/kg H₂O, or about 250 mOsm/kg H₂O to about 360 mOsm/kg H₂O. In some embodiments, the osmolality is about 360 mOsm/kg H₂O to about 1255 mOsm/kg H₂O, about 360 mOsm/kg H₂O to about 1100 mOsm/kg H₂O, about 360 mOsm/kg H₂O to about 900 mOsm/kg H₂O, about 360 mOsm/kg H₂O to about 700 mOsm/kg H₂O, about 360 mOsm/kg H₂O to about 500 mOsm/kg H₂O, about 360 mOsm/kg H₂O to about 400 mOsm/kg H₂O. In some embodiments, the osmolality is about 250 mOsm/kg H₂O, 255 mOsm/kg H₂O, 260 mOsm/kg H₂O, 270 mOsm/kg H₂O, 275 mOsm/kg H₂O, about 280 mOsm/kg H₂O, about 285 mOsm/kg H₂O, about 290 mOsm/kg H₂O, about 300 mOsm/kg H₂O, about 305 mOsm/kg H₂O, about 310 mOsm/kg H₂O, about 315 mOsm/kg H₂O, about 320 mOsm/kg H₂O, about 325 mOsm/kg H₂O, about 330 mOsm/kg H₂O, about 335 mOsm/kg H₂O, about 340 mOsm/kg H₂O, about 345 mOsm/kg H₂O, about 350 mOsm/kg H₂O, about 355 mOsm/kg H₂O, about 360 mOsm/kg H₂O, about 365 mOsm/kg H₂O, about 370 mOsm/kg H₂O, about 375 mOsm/kg H₂O, about 380 mOsm/kg H₂O, about 385 mOsm/kg H₂O, about 390 mOsm/kg H₂O, about 395 mOsm/kg H₂O, or about 400 mOsm/kg H₂O. In certain embodiments, the osmolality is about 280 mOsm/kg H₂O, about 292 mOsm/kg H₂O, about 340 mOsm/kg H₂O, or about 362 mOsm/kg H₂O.

[0476] In some embodiments, the buffer is selected from one or more of the exemplary buffers set forth in Tables 5 and 6. In certain embodiments, the buffer is selected from Buffer 1, Buffer 2, or Buffer 3.

[0477] In some embodiments, the buffer of the invention is used in conjunction with an UltraPorator™ electroporation apparatus and cartridge (or, cassette); see, PCT/US20/59984 (filed Nov. 11, 2020) and U.S. patent application Ser. No. 17/095,028 (filed Nov. 11, 2020). This apparatus is designed to enable rapid manufacturing for a range of gene and cell therapies. UltraPorator™ is a high-throughput, semi-closed electroporation system for electroporation of large quantities of cells in a single operation. The UltraPorator™ system is an advancement over current electroporation devices by significantly reducing the processing time and contamination risk. For example, UltraPorator may be utilized as a scale-up and commercialization solution for decentralized chimeric antigen receptor (CAR) T-cell manufacturing, such as in the UltraCAR-T™ manufacturing of T-cells reprogrammed to target cancer antigens in vivo.

[0478] Buffers of the invention are surprisingly effective in producing high cell transfection efficiencies when electroporation is performed using the buffers in the UltraPorator™ electroporation apparatus and/or cartridge (or, cassette); see, PCT/US20/59984 (filed Nov. 11, 2020) and U.S. patent application Ser. No. 17/095,028.

[0479] b. Methods Utilizing the EP Buffer and Recombinant Cells Produced Using Those Methods

[0480] In another aspect of the invention, a method is provided that utilizes the buffer according to the invention to introduce biologically active material (e.g., DNA or RNA) into cells via electric current (i.e., electroporation). The method comprises forming a suspension by combining cells obtained from a human along with an exogenous biological material into the buffer of the invention, and then applying an electric current in the form of a voltage pulse to the suspension, thereby facilitating the introduction of the biological material into the cells.

[0481] In certain embodiments, the voltage pulse may have a field strength of up to 1 to 10 kV*cm-1 and a duration of 5 to 250 μs and a current density of at least 2 A*cm-2. In certain embodiments, the voltage pulse permits the biologically active material (e.g., DNA) to be transfected directly into the cell nucleus of animal and human cells. In certain embodiments, a current flow following the voltage pulse without interruption, having a current density of 2 to 14 A*cm-2, preferably up to 5 A*cm-2, and a duration of 1 to 100 ms, may also be applied.

[0482] Using the method according to the invention, the transfection of biologically active material into cells, including into the nucleus of animal cells, may be optimized. In this case, the biologically active material (e.g., nucleic acids, polypeptides, or the like) can be introduced into quiescent or dividing animal cells with a high efficiency.

[0483] In some embodiments, the cells are exposed to the buffer for less than 10 minutes. For example, the cells may be exposed to the buffer for less than 9 minutes, less than 8 minutes, less than 7 minutes, less than 6 minutes, less than 5 minutes, less than 4 minutes, less than 3 minutes, less than 2 minutes, or less than 1 minute.

[0484] In some embodiments, the method is used to introduce biologically active material into primary human blood cells, pluripotent precursor cells of human blood, as well as primary human fibroblasts and endothelial cells. In some embodiments, the cells are human blood cells, for example immune cells. In certain embodiments, the immune cells are neutrophils, eosinophils, basophils, mast cells, monocytes, macrophages, dendritic cells, natural killer cells, and lymphocytes (B cells and T cells), or some combination thereof. In some embodiments, the lymphocytes are T-cells. In certain embodiments, the cells are obtained from a patient.

[0485] In some embodiments, the biological material includes a nucleic acid, peptide, polypeptide, protein, enzyme, RNP, or some combination thereof. In some embodiments, the biological material is heterologous to the cells. In some embodiments, the biological material is partially or fully synthetic.

[0486] In some embodiments, the nucleic acid is selected from DNA or RNA. In some embodiments, the DNA may comprise cDNA. In some embodiments, the RNA may comprise mRNA, tRNA, mRNA, lncRNA, sRNA, or a combination thereof. In some embodiments, the nucleic acid is a recombinant nucleic acid. In some embodiments, the peptide comprises a polypeptide, protein, enzyme, antibody, antibody fragment, or combination thereof. In some embodiments, the peptide is recombinant.

[0487] Methods utilizing the buffer of the invention result in desirably high transfection yields, especially as compared to methods utilizing other electroporation buffers. In some embodiments, the transfection yield with a buffer of the invention is at least about 1.1 times that of the transfection yield with a control (prior art) buffer. For example, the transfection yield with a buffer of the invention may be about 1.1, 1.2, 1.3, 1.4, 1.5, 1.6, 1.7, 2.8, 1.9, 2.0, 2.1, 2.2, 2.3, 2.4, 2.5, 2.6, 2.7, 2.8, 2.9, 3.0, 3.1, 3.2, 3.3, 3.4, 3.5, 3.6, 3.7, 3.8, 3.9, 4.0, 4.1, 4.2, 4.3, 4.4, 4.5, 4.6, 4.7, 4.8, 4.9, or 5.0 times higher than that of a control (prior art) buffer. In some embodiments, the transfection yield with a buffer of the invention may be greater than 5 times than that of a control (prior art) buffer, such as 6, 7, 8, 9, or 10 times higher. In certain embodiments, the transfection yield with a buffer of the invention is 1.35, 1.41, 1.46, 1.97, 1.98, 2.05, 2.12, 2.40, or 2.44 times higher than that of a control (prior art) buffer.

[0488] Methods utilizing the buffer of the invention result in desirably high transfected cell recovery yields, especially as compared to methods utilizing other electroporation buffers. In some embodiments, the transfected cell recovery yield with a buffer of the invention is at least about 1.1 times that of the transfected cell recovery yield with a control (prior art) buffer. For example, the transfected cell recovery yield with a buffer of the invention may be about 1.1, 1.2, 1.3, 1.4, 1.5, 1.6, 1.7, 2.8, 1.9, 2.0, 2.1, 2.2, 2.3, 2.4, 2.5, 2.6, 2.7, 2.8, 2.9, 3.0, 3.1, 3.2, 3.3, 3.4, 3.5, 3.6, 3.7, 3.8, 3.9, 4.0, 4.1, 4.2, 4.3, 4.4, 4.5, 4.6, 4.7, 4.8, 4.9, or 5.0 higher than that of a control (prior art) buffer. In some embodiments, the transfected cell recovery yield with a buffer of the invention may be greater than 5 times than that of a control (prior art) buffer. In certain embodiments, the transfected cell recovery yield with a buffer of the invention is 1.53, 1.66, 1.72, 1.80, 2.06, 2.17, 2.23, 2.34, or 2.61 times higher than that of a control (prior art) buffer.

[0489] In another aspect of the invention, recombinant cells are provided. In some embodiments, recombinant immune cells are produced using the method of the invention. In certain embodiments, the recombinant immune cell is a modified T-cell. In some embodiments, the modified T-cell is a chimeric antigen receptor (CAR) T-cell. In some embodiments, the CAR-T cell is administered to a patient for therapeutic purposes.

[0490] c. Electroporation Apparatuses and Their Methods of Use

[0491] An exemplary electroporation apparatus comprises: one or more chambers configured to store the buffer and cells during an electroporation process; one or more pairs of electrodes configured to generate electric fields within the one or more chambers during the electroporation process, each electric field corresponding to one chamber; and a flow channel configured to transport the cells during a cell collection process after the electroporation process.

[0492] In some embodiments, the apparatus comprises one chamber, two chambers, three chambers, four chambers, five chambers, six chambers, seven chambers, eight chambers, nine chambers, ten chambers, or ten or more chambers. In certain embodiments, the apparatus utilizes continuous flow or a microfluidic system.

[0493] In some embodiments, the electroporation apparatus further comprises a pump for pumping a liquid medium from the flow channel into at least one of the chambers during a collection process, wherein the liquid medium is obtained at the inlet port. In some embodiments, the pump comprises a valve or valves connecting the one or more chambers to the flow channel. In some embodiments, the valve or valves are opened one at a time. In some embodiments, the valve or valves permit only one-directional flow of fluid. In some embodiments, each valve corresponds to one chamber. In some embodiments, each valve corresponding to the chamber valves is a pinch-valve or pinch-type valve. In some embodiments, each of the valves operates using a spring motion, a lever motion, or a piston motion.

[0494] In some embodiments, the one or more chambers comprises a given chamber; each electrode of the pair of electrodes is located on opposite sides of the given chamber; and each electrode of the pair of electrodes comprises both an interior portion inside the given chamber and an exterior portion external to the given chamber.

[0495] In some embodiments, the electroporation apparatus further comprises: an inlet port; an outlet port; and one or more flanking flow channels connecting the inlet port and the outlet port to the flow channel.

[0496] In some embodiments, the electroporation apparatus further comprises: a pump for pumping a liquid medium from the flow channel into at least one of the chambers during a collection process, wherein the liquid medium is obtained at the inlet port.

[0497] In some embodiments, the electroporation apparatus further comprises: a surface comprising a one or more openings leading to the one or more chambers; and an airflow channel below the openings and connecting airflow between the chambers.

[0498] In some embodiments, the electroporation apparatus further comprises: a vent or air filter connecting the airflow channel to an exterior of the electroporation apparatus.

[0499] In some embodiments, the electroporation apparatus further comprises: a seal configured to cover the one or more openings. In some embodiments, each chamber in the electroporation apparatus comprises a shape which narrows toward the respective valve(s). In some embodiments, the electroporation apparatus further comprises a pair of electrodes wherein each electrode of the electrode pair is located on opposite sides of each chamber. The distance between the two electrodes in an electrode pair is referred to as the “gap distance” or “separation distance.” This distance spans the width of the chamber.

[0500] In some embodiments, each of the one or more chambers comprises a gap distance of about 0.1 mm to about 20 mm, about 0.5 mm to about 10 mm, about 1 mm to about 7 mm, or about 1 mm to about 4 mm. In some embodiments, the gap distance is about 0.5 mm, 1.0 mm, 1.5 mm, 2.0 mm, 2.5 mm, 3.0 mm, 3.5 mm, 4.0 mm, 4.5 mm, 5.0 mm, 5.5 mm, 6.0 mm, 6.5 mm, 7.0 mm, 7.5 mm, or 8.0 mm. In some embodiments, a gap distance of about 2.5 mm, 2.6 mm, 2.7 mm, 2.8 mm, 2.9 mm, 3.0 mm, 3.1 mm, 3.2 mm, 3.3 mm, 3.4 mm, 3.5 mm, 3.6 mm, 3.7 mm, 3.8 mm, 3.9 mm, or 4.0 mm. In some embodiments, the gap distance is less than about 4 mm, less than about 3.5 mm, less than about 3.0 mm, less than about 2.5 mm, less than about 2.0 mm, less than about 1.5 mm, or less than about 1.0 mm. In some embodiments, a gap distance of less than about 4.0 mm improves the electroporation performance of the buffer provided herein.

[0501] In some embodiments, each electrode of the pair of electrodes of the electroporation apparatus comprises: an interior portion inside the given chamber; and an exterior portion external to the given chamber, wherein each pair of electrodes is configured to connect to an electric circuit. In some embodiments, the interior portion inside the given chamber has an elliptical face and comprises a gold coating.

[0502] In some embodiments, each chamber of the electroporation apparatus is configured to store a volume of at least about 50 μL, at least about 100 μL, at least about 150 at least about μL, at least about 200 μL, at least about 250 μL, at least about 300 μL, at least about 350 μL, at least about 400 μL, at least about 450 μL, at least about 150 μL, at least about 500 μL, at least about 550 μL, at least about 600 μL, at least about 650 μL, at least about 700 μL, at least about 750 μL, at least about 800 μL, at least about 850 μL, at least about 900 μL, at least about 950 μL, or at least about 1000 μL (1.0 mL).

[0503] In some embodiments, the chambers of the electroporation apparatus, in combination, are configured to store at least about 500 μL, at least about 1.0 mL, at least about 1.2 mL, at least about 1.4 mL, at least about 1.6 mL, at least about 1.8 mL, at least about 2.0 mL, at least about 2.2 mL, at least about 2.4 mL, at least about 2.6 mL, at least about 2.8 mL, at least about 3.0 mL, at least about 3.2 mL, at least about 3.4 mL, at least about 3.6 mL, at least about 3.8 mL, at least about 4.0 mL, at least about 4.2 mL, at least about 4.4 mL, at least about 4.6 mL, at least about 4.8 mL, at least about 5.0 mL, at least about 5.2 mL, at least about 5.4 mL, at least about 5.6 mL, at least about 5.8 mL, at least about 6.0 mL, at least about 6.2 mL, at least about 6.4 mL, at least about 6.6 mL, at least about 6.8 mL, or at least about 7.0 mL of cells in liquid suspension for electroporation.

[0504] In some embodiments, the cells involved in the electroporation process comprises a population selected from a group consisting of: at least 1×10⁸ cells, at least 2×10⁸ cells, at least 3×10⁸ cells, at least 4×10⁸ cells, at least 5×10⁸ cells, at least 6×10⁸ cells, at least 7×10⁸ cells, at least 8×10⁸ cells, at least 9×10⁸ cells, at least 1×10⁹ cells, at least 2×10⁹ cells, at least 3×10⁹ cells, at least 4×10⁹ cells, at least 5×10⁹ cells, at least 6×10⁹ cells, at least 7×10⁹ cells, at least 8×10⁹ cells, at least 9×10⁹ cells, at least 1×10¹⁰ cells, at least 2×10¹⁰ cells, at least 3×10¹⁰ cells, at least 4×10¹⁰ cells, at least 5×10¹⁰ cells, at least 6×10¹⁰ cells, at least 7×10¹⁰ cells, at least 8×10¹⁰ cells, at least 9×10¹° cells, at least 1×10¹¹ cells, at least 2×10¹¹ cells, at least 3×10¹¹ cells, at least 4×10¹¹ cells, at least 5×10¹¹ cells, at least 6×10¹¹ cells, at least 7×10¹¹ cells, at least 8×10¹¹ cells, at least 9×10¹¹ cells, at least 1×10¹² cells, at least 2×10¹² cells, at least 3×10¹² cells, at least 4×10¹² cells, at least 5×10¹² cells, at least 6×10¹² cells, at least 7×10¹² cells, at least 8×10¹² cells, and at least 9×10¹².

[0505] In some embodiments, the apparatus of the invention comprises an UltraPorator™ electroporation apparatus and cartridge (see, PCT/US20/59984 and U.S. patent application Ser. No. 17/095,028). As noted above, the UltraPorator™ electroporation apparatus is designed to enable rapid manufacturing for a range of gene and cell therapies. The apparatus may be utilized as a scale-up and commercialization solution for decentralized CAR T-cell manufacturing, such as in the UltraCAR-T™ manufacturing of T-cells reprogrammed to target cancer antigens in vivo.

[0506] In some embodiments, the apparatus of the invention is used in a method of electroporation, the method comprising: executing an electroporation process by generating an electric field within a chamber using a pair of electrodes, wherein the chamber is configured to store the buffer and cells during the electroporation process; and executing a cell collection process by: opening a valve connected to the chamber; and transporting the buffer and cells to an outlet port using a flow channel connected to the valve, wherein the chamber, the electrode pair, the valve, the outlet port, and the flow channel are each located within an electroporation apparatus.

[0507] In some embodiments, the step of executing a cell collection process further comprises: pumping, through use of a pump, a liquid medium from the flow channel into the chamber, wherein the liquid medium is obtained at an inlet port, and wherein the inlet port and the outlet port are connected to the flow channel by a flanking flow channel within the electroporation apparatus.

[0508] In some embodiments, the cell collection process further comprises: draining the chamber into the flow channel, wherein pressure within the chamber is maintained via a vent or air filter connected to an air flow channel running between the chamber and another chamber.

[0509] In some embodiments, the method of electroporation further comprises: depositing the cells into an opening leading to the chamber holding the buffer; applying a seal to the opening; and connecting the electrode pair to at least one circuit by, for example, inserting the electroporation apparatus into a docking station.

[0510] In some embodiments, the method utilizes one or more of the exemplary buffers set forth in Tables 5 and 6. In certain embodiments, the method utilizes Buffer 1, Buffer 2, or Buffer 3.

[0511] In some embodiments, the method is performed in an UltraPorator™ electroporation apparatus (see, PCT/US20/59984 and U.S. patent application Ser. No. 17/095,028). In certain embodiments, the method is performed in an UltraPorator™ electroporation apparatus and utilizes one or more of the exemplary buffers set forth in Tables 5 and 6. In certain embodiments, the method is performed in an UltraPorator™ electroporation apparatus and utilizes Buffer 1, Buffer 2, or Buffer 3 (as set forth in Table 5).

[0512] d. Electroporation Systems

[0513] In another aspect of the invention, a system for electroporation is provided. In some embodiments, the system for electroporation comprises an electroporation apparatus, as described herein, and an electroporation buffer, as described herein. In some embodiments, the electroporation system comprises and UltraPorator™ electroporation apparatus and cartridge (see, PCT/US20/59984 and U.S. patent application Ser. No. 17/095,028). As noted above, the UltraPorator™ electroporation apparatus is designed to enable rapid manufacturing for a range of gene and cell therapies. The device may be utilized as a scale-up and commercialization solution for decentralized CAR T-cell manufacturing, such as in the UltraCAR-T™ manufacturing of T-cells reprogrammed to target cancer antigens in vivo.

[0514] In some embodiments, the system for electroporation further comprises a buffer is from one or more of the exemplary buffers set forth in Tables 5 and 6. In certain embodiments, the system for electroporation comprises a buffer selected from Buffer 1, Buffer 2, or Buffer 3. It has been found that systems comprising an UltraPorator™ device and one of Buffers 1, 2, or 3 result in surprisingly high cell transfection efficiencies, as compared to systems comprising an UltraPorator™ device and a control buffer.

[0515] e. Kits for Electroporation

[0516] In another aspect of the invention, a kit for electroporation is provided. The kit may include any of the buffers as described herein. In some embodiments, the kit comprises one or more of the exemplary buffers set forth in Tables 5 and 6. In certain embodiments, the kit comprises a buffer selected from Buffer 1, Buffer 2, or Buffer 3.

[0517] In some embodiments, the kit includes one or more containers filled with a buffer according to the invention and other suitable reagents and/or devices. For example, the kit may additionally comprise a vector comprising a nucleic acid of interest. In some embodiments, the kit may include a dropper, pipette, and/or cuvette. In some embodiments, the buffer may be packaged in aliquoted containers or as a stock solution.

[0518] In some embodiments, the kit further comprises packaging to safely transport the buffer and any additional reagents and/or devices. In some embodiments, the kit includes information about the contents of the buffer and any additional reagents. Further, the kit may comprise written materials, for example a user manual or answers to frequently asked questions.

[0519] 2. Chemical Methods

[0520] Chemical methods for introducing a polynucleotide into a host cell include colloidal dispersion systems, such as macromolecule complexes, nanocapsules, microspheres, beads, and lipid-based systems including oil-in-water emulsions, micelles, mixed micelles, and liposomes. An exemplary colloidal system for use as a delivery vehicle in vitro and in vivo is a liposome (e.g., an artificial membrane vesicle).

[0521] 3. Viral Vectors and Delivery Methods

[0522] In the case where a viral delivery system is utilized, an exemplary delivery vehicle is a liposome. Lipid formulations can be used for the introduction of the nucleic acids into a host cell (in vitro, ex vivo, or in vivo). In another aspect, the nucleic acid can be associated with a lipid. The nucleic acid associated with a lipid can be encapsulated in the aqueous interior of a liposome, interspersed within the lipid bilayer of a liposome, attached to a liposome via a linking molecule that is associated with both the liposome and the oligonucleotide, entrapped in a liposome, complexed with a liposome, dispersed in a solution containing a lipid, mixed with a lipid, combined with a lipid, contained as a suspension in a lipid, contained or complexed with a micelle, or otherwise associated with a lipid. Lipid, lipid/DNA or lipid/expression vector associated compositions are not limited to any particular structure in solution. For example, they can be present in a bilayer structure, as micelles, or with a “collapsed” structure. They can also simply be interspersed in a solution, possibly forming aggregates that are not uniform in size or shape. Lipids are fatty substances which can be naturally occurring or synthetic lipids. For example, lipids include the fatty droplets that naturally occur in the cytoplasm as well as the class of compounds which contain long-chain aliphatic hydrocarbons and their derivatives, such as fatty acids, alcohols, amines, amino alcohols, and aldehydes.

[0523] Lipids suitable for use can be obtained from commercial sources. For example, dimyristyl phosphatidylcholine (“DMPC”) can be obtained from Sigma, St. Louis, Mo.; dicetyl phosphate (“DCP”) can be obtained from K & K Laboratories (Plainview, N.Y.); cholesterol (“Chol”) can be obtained from Calbiochem-Behring; dimyristyl phosphatidylglycerol (“DMPG”) and other lipids can be obtained from Avanti Polar Lipids, Inc. (Birmingham, Ala.). Stock solutions of lipids in chloroform or chloroform/methanol can be stored at about −20° C. Chloroform is used as the only solvent since it is more readily evaporated than methanol. “Liposome” is a generic term encompassing a variety of single and multilamellar lipid vehicles formed by the generation of enclosed lipid bilayers or aggregates. Liposomes can be characterized as having vesicular structures with a phospholipid bilayer membrane and an inner aqueous medium. Multilamellar liposomes have multiple lipid layers separated by aqueous medium. They form spontaneously when phospholipids are suspended in an excess of aqueous solution. The lipid components undergo self-rearrangement before the formation of closed structures and entrap water and dissolved solutes between the lipid bilayers (Ghosh et al., Glycobiology 5: 505-10 (1991)). However, compositions that have different structures in solution than the normal vesicular structure are also encompassed. For example, the lipids can assume a micellar structure or merely exist as nonuniform aggregates of lipid molecules. Also contemplated are lipofectamine-nucleic acid complexes.

[0524] Also provided herein are viral-based delivery systems, in which a nucleic acid of the present invention is inserted. Representative viral expression vectors include, but are not limited to, the adenovirus-based vectors (e.g., the adenovirus-based Per.C6 system available from Crucell, Inc. (Leiden, The Netherlands)), adeno-associated virus based vectors, lentivirus-based vectors (e.g., the lentiviral-based pLPI from Life Technologies (Carlsbad, Calif.)), retroviral vectors (e.g., the pFB-ERV plus pCFB-EGSH), and herpes virus-based vectors. In an embodiment, the viral vector is a lentivirus vector. Vectors derived from retroviruses such as the lentivirus are suitable tools to achieve long-term gene transfer since they allow long-term, stable integration of a transgene and its propagation in daughter cells. Lentiviral vectors have the added advantage over vectors derived from onco-retroviruses such as murine leukemia viruses in that they can transduce non-proliferating cells, such as hepatocytes. They also have the added advantage of low immunogenicity. In general, and in embodiments, a suitable vector contains an origin of replication functional in at least one organism, a promoter sequence, convenient restriction endonuclease sites, and one or more selectable markers, (e.g., WO 01/96584; WO 01/29058; and U.S. Pat. No. 6,326,193).

[0525] In some embodiments, a lentiviral vector is provided comprising a backbone and a nucleic acid sequence encoding one or more miRNA(s) and a CAR. Optionally, the vector further comprises a nucleic acid encoding a cytokine and a cell tag such as truncated HER1, CD20t-1 or a full length CD20.

[0526] In some embodiments, the nucleic acid encoding one or more miRNA(s) and a CAR is cloned into a vector comprising lentiviral backbone components. Exemplary backbone components include, but are not limited to, pFUGW, and pSMPUW. The pFUGW lentiviral vector backbone is a self-inactivating (SIN) lentiviral vector backbone and has unnecessary HIV-1 viral sequences removed resulting in reduced potential for the development of neoplasia, harmful mutations, and regeneration of infectious particles. In some embodiments, the vector encoding one or more miRNA(s) and a CAR also encodes a cytokine in a single construct. In some embodiments, the one or more miRNA(s) and a CAR and cytokine are encoded on two separate lentiviral vectors. In some embodiments, the cytokine is expressed with a cell tag. In some embodiments, one or more miRNA(s) and a CAR can be co-expressed with the cytokine and the cell tag from a single lentiviral vector. In further embodiments, one or more miRNA(s) and a CAR can be under the control of an inducible promoter. In another embodiment, the cytokine can be under the control of an inducible promoter. In one aspect, the inducible promoter can be a gene switch ligand inducible promoter. In some cases, an inducible promoter can be a small molecule ligand-inducible two polypeptide ecdysone receptor-based gene switch, such as RHEOSWITCH® gene switch.

[0527] Other suitable vectors include integrating expression vectors, which can randomly integrate into the host cell's DNA, or can include a recombination site to enable the specific recombination between the expression vector and the host cell's chromosome. Such integrating expression vectors can utilize the endogenous expression control sequences of the host cell's chromosomes to effect expression of the desired protein. Examples of vectors that integrate in a site specific manner include, for example, components of the flp-in system from Invitrogen (Carlsbad, Calif.) (e.g., pcDNA™5/FRT), or the cre-lox system, such as can be found in the pExchange-6 Core Vectors from Stratagene (La Jolla, Calif.). Examples of vectors that randomly integrate into host cell chromosomes include, for example, pcDNA3.1 (when introduced in the absence of T-antigen) from Invitrogen (Carlsbad, Calif.), and pCI or pFN10A (ACT) FLEXI™ from Promega (Madison, Wis.). Additional promoter elements, e.g., enhancers, regulate the frequency of transcriptional initiation. Typically, these are located in the region 30-110 bp upstream of the start site, although a number of promoters have recently been shown to contain functional elements downstream of the start site as well. The spacing between promoter elements frequently is flexible, so that promoter function is preserved when elements are inverted or moved relative to one another. In the thymidine kinase (tk) promoter, the spacing between promoter elements can be increased to 50 bp apart before activity begins to decline. Depending on the promoter, it appears that individual elements can function either cooperatively or independently to activate transcription.

[0528] In some embodiments, the cell tag gene is cloned into a lentiviral plasmid backbone in frame with the CAR gene. In other embodiments, the cell tag is cloned into a separate lentiviral vector.

[0529] 4. Non-Viral Vectors and Delivery Systems

[0530] a. Sleeping Beauty Transposon System

[0531] A polynucleotide encoding one or more miRNA(s) alone or a polynucleotide encoding one or more miRNA(s) and a chimeric receptor, cytokine, and/or cell tag as described herein can be introduced into immune effector cells using non-viral based delivery systems, such as the “Sleeping Beauty (SB) Transposon System,” which refers to a synthetic DNA transposon system for introducing DNA sequences into the chromosomes of vertebrates. An exemplary Sleeping Beauty transposon system is described for example, in U.S. Pat. Nos. 6,489,458 and 8,227,432. As used herein, the Sleeping Beauty transposon system can comprise Sleeping Beauty transposase polypeptides as well as derivatives, functional fragments, and variants thereof, and Sleeping Beauty transposon polynucleotides, derivatives, and functional variants and fragments thereof. In certain embodiments, the Sleeping Beauty transposase is encoded by an mRNA. In some embodiments, the mRNA encodes for a SB10, SB11, SB100x or SB110 transposase. In some embodiments, the mRNA comprises a cap and a poly-A tail.

[0532] DNA transposons translocate from one DNA site to another in a simple, cut-and-paste manner. Transposition is a precise process in which a defined DNA segment is excised from one DNA molecule and moved to another site in the same or different DNA molecule or genome. As with other Tc 1/mariner-type transposases, SB transposase inserts a transposon into a TA dinucleotide base pair in a recipient DNA sequence. The insertion site can be elsewhere in the same DNA molecule, or in another DNA molecule (or chromosome). In mammalian genomes, including humans, there are approximately 200 million TA sites. The TA insertion site is duplicated in the process of transposon integration. This duplication of the TA sequence is a hallmark of transposition and used to ascertain the mechanism in some experiments. The transposase can be encoded either within the transposon or the transposase can be supplied by another source, in which case the transposon becomes a non-autonomous element. Non-autonomous transposons are most useful as genetic tools because after insertion they cannot independently continue to excise and re-insert. Sleeping Beauty transposons envisaged to be used as non-viral vectors for introduction of genes into genomes of vertebrate animals and for gene therapy.

[0533] Briefly, the Sleeping Beauty system (Hackett et al., Mol Ther 18:674-83, (2010)) was adapted to genetically modify the immune effector cells (Cooper et al., Blood 105:1622-31, (2005)). In one embodiment, this involves two steps: (i) the electro-transfer of DNA plasmids expressing a Sleeping Beauty transposon (Jin et al., Gene Ther 18:849-56, (2011); Kebriaei et al., Hum Gene Ther 23:444-50, (2012)) and Sleeping Beauty transposase and (ii) the propagation and expansion of T cells stably expressing integrants on designer artificial antigen-presenting cells (AaPC) derived from the K562 cell line (also known as AaPCs (Activating and Propagating Cells). In another, embodiment, the second step (ii) is eliminated and the genetically modified T cells are cryopreserved or immediately infused into a patient.

[0534] In one embodiment, the Sleeping Beauty transposon systems are described for example in Hudecek et al., Critical Reviews in Biochemistry and Molecular Biology, 52:4, 355-380 (2017), Singh et al., Cancer Res (8):68 (2008). Apr. 15, 2008 and Maiti et al., J Immunother. 36(2): 112-123 (2013).

[0535] In some embodiments, one or more miRNA(s), a CAR, a cytokine, and a cell tag can be encoded by a single transposon DNA plasmid vector. In some embodiments, the one or more miRNA(s), CAR, cytokine, and cell tag can be encoded by different transposon DNA plasmid vectors. In further embodiments, one or more miRNA(s) and a CAR can be under the control of an inducible promoter. In another embodiment, the cytokine can be under the control of an inducible promoter. In one aspect, the inducible promoter can be a gene switch ligand inducible promoter. In some cases, an inducible promoter can be a small molecule ligand-inducible two polypeptide ecdysone receptor-based gene switch, such as RHEOSWITCH® gene switch further described below. In certain embodiments, the CAR, cytokine, and cell tag can be configured in one, two or more transposons.

[0536] In some embodiments, the MUC16, CD33, or ROR1-specific CARs and other genetic elements are delivered to a cell using the SB11 transposon system, the SB100X transposon system, the SB110 transposon system, the piggyBac transposon system (see, e.g., U.S. Pat. Nos. 6,489,458; 8,227,432, 9,228,180, Wilson et al, “PiggyBac Transposon-mediated Gene Transfer in Human Cells,” Molecular Therapy 15:139-145 (2007) and WO 2016/145146) and/or the piggyBat transposon system (see, e.g., Mitra et al., “Functional characterization of piggyBat from the bat Myotis lucifugus unveils an active mammalian DNA transposon,” Proc. Natl. Acad. Sci USA 110:234-239 (2013). Additional transposases and transposon systems are provided in U.S. Pat. Nos. 7,148,203; 8,227,432; U.S. Patent Publn. No. 2011/0117072; Mates et al., Nat Genet, 41(6):753-61 (2009). doi: 10.1038/ng.343. Epub 2009 May 3, Gene Ther., 18(9):849-56 (2011). doi: 10.1038/gt.2011.40. Epub 2011 Mar. 31 and in Ivics et al., Cell. 91(4):501-10, (1997).

[0537] In certain embodiments, the vector is a Sleeping Beauty plasmid that comprises a left transposon repeat region and a right transposon repeat region. In certain embodiments, the left transposon repeat region comprises a nucleic acid comprising SEQ ID NO: 580 or a functional fragment or variant thereof. In certain embodiments, the functional variant has at least 80%, 85%, 90%, 95%, 96%, 97%, 98%, or 99% sequence identity with SEQ ID NO: 580, or hybridizes under stringent hybridization conditions with the complement of SEQ ID NO: 580. In certain embodiments, the right transposon repeat region comprises a nucleic acid comprising SEQ ID NO: 581 or a functional fragment or variant thereof. In certain embodiments, the functional variant has at least 80%, 85%, 90%, 95%, 96%, 97%, 98%, or 99% sequence identity with SEQ ID NO: 581, or hybridizes under stringent hybridization conditions with the complement of SEQ ID NO: 581.

[0538] b. Recombinase-Based Delivery Systems

[0539] In other embodiments, nucleic acids encoding one or more miRNA(s), a CAR, a cytokine, and/or a cell tag can be integrated into the immune effector cell's DNA through a recombinase and integrating expression vectors. Such vectors can randomly integrate into the host cell's DNA, or can include a recombination site to enable the specific recombination between the expression vector and the host cell's chromosome. Such integrating expression vectors can utilize the endogenous expression control sequences of the host cell's chromosomes to effect expression of the desired protein. In some embodiments, targeted integration is promoted by the presence of sequences on the donor polynucleotide that are homologous to sequences flanking the integration site. For example, targeted integration using the donor polynucleotides described herein can be achieved following conventional transfection techniques, e.g. techniques used to create gene knockouts or knockins by homologous recombination. In other embodiments, targeted integration is promoted both by the presence of sequences on the donor polynucleotide that are homologous to sequences flanking the integration site, and by contacting the cells with donor polynucleotide in the presence of a site-specific recombinase. By a site-specific recombinase, or simply a recombinase, it is meant a polypeptide that catalyzes conservative site-specific recombination between its compatible recombination sites. As used herein, a site-specific recombinase includes native polypeptides as well as derivatives, variants and/or fragments that retain activity, and native polynucleotides, derivatives, variants, and/or fragments that encode a recombinase that retains activity.

[0540] The recombinases can be introduced into a target cell before, concurrently with, or after the introduction of a targeting vector. The recombinase can be directly introduced into a cell as a protein, for example, using liposomes, coated particles, or microinjection. Alternately, a polynucleotide, either DNA or messenger RNA, encoding the recombinase can be introduced into the cell using a suitable expression vector. The targeting vector components described above are useful in the construction of expression cassettes containing sequences encoding a recombinase of interest. However, expression of the recombinase can be regulated in other ways, for example, by placing the expression of the recombinase under the control of a regulatable promoter (i.e., a promoter whose expression can be selectively induced or repressed).

[0541] A recombinase can be from the Integrase or Resolvase families. The Integrase family of recombinases has over one hundred members and includes, for example, FLP, Cre, and lambda integrase. The Integrase family, also referred to as the tyrosine family or the lambda integrase family, uses the catalytic tyrosine's hydroxyl group for a nucleophilic attack on the phosphodiester bond of the DNA. Typically, members of the tyrosine family initially nick the DNA, which later forms a double strand break. Examples of tyrosine family integrases include Cre, FLP, SSV1, and lambda (λ) integrase. In the resolvase family, also known as the serine recombinase family, a conserved serine residue forms a covalent link to the DNA target site (Grindley, et al., (2006) Ann Rev Biochem 16:16).

[0542] In one embodiment, the recombinase is an isolated polynucleotide sequence comprising a nucleic acid sequence that encodes a recombinase selecting from the group consisting of a SPβc2 recombinase, a SF370.1 recombinase, a Bxb1 recombinase, an A118 recombinase and a ϕRv1 recombinase. Examples of serine recombinases are described in detail in U.S. Pat. No. 9,034,652.

[0543] Recombinases for use in the practice of the present invention can be produced recombinantly or purified as previously described. Polypeptides having the desired recombinase activity can be purified to a desired degree of purity by methods known in the art of protein ammonium sulfate precipitation, purification, including, but not limited to, size fractionation, affinity chromatography, HPLC, ion exchange chromatography, heparin agarose affinity chromatography (e.g., Thorpe & Smith, Proc. Nat. Acad. Sci. 95:5505-5510, 1998.)

[0544] In one embodiment, the recombinases can be introduced into the eukaryotic cells that contain the recombination attachment sites at which recombination is desired by any suitable method. Methods of introducing functional proteins, e.g., by microinjection or other methods, into cells are well known in the art. Introduction of purified recombinase protein ensures a transient presence of the protein and its function, which is often a preferred embodiment. Alternatively, a gene encoding the recombinase can be included in an expression vector used to transform the cell, in which the recombinase-encoding polynucleotide is operably linked to a promoter which mediates expression of the polynucleotide in the eukaryotic cell. The recombinase polypeptide can also be introduced into the eukaryotic cell by messenger RNA that encodes the recombinase polypeptide. It is generally preferred that the recombinase be present for only such time as is necessary for insertion of the nucleic acid fragments into the genome being modified. Thus, the lack of permanence associated with most expression vectors is not expected to be detrimental. One can introduce the recombinase gene into the cell before, after, or simultaneously with, the introduction of the exogenous polynucleotide of interest. In one embodiment, the recombinase gene is present within the vector that carries the polynucleotide that is to be inserted; the recombinase gene can even be included within the polynucleotide.

[0545] In one embodiment, a method for site-specific recombination comprises providing a first recombination site and a second recombination site; contacting the first and second recombination sites with a prokaryotic recombinase polypeptide, resulting in recombination between the recombination sites, wherein the recombinase polypeptide can mediate recombination between the first and second recombination sites, the first recombination site is attP or attB, the second recombination site is attB or attP, and the recombinase is selected from the group consisting of a Listeria monocytogenes phage recombinase, a Streptococcus pyogenes phage recombinase, a Bacillus subtilis phage recombinase, a Mycobacterium tuberculosis phage recombinase and a Mycobacterium smegmatis phage recombinase, provided that when the first recombination attachment site is attB, the second recombination attachment site is attP, and when the first recombination attachment site is attP, the second recombination attachment site is attB

[0546] Further embodiments provide for the introduction of a site-specific recombinase into a cell whose genome is to be modified. One embodiment relates to a method for obtaining site-specific recombination in an eukaryotic cell comprises providing a eukaryotic cell that comprises a first recombination attachment site and a second recombination attachment site; contacting the first and second recombination attachment sites with a prokaryotic recombinase polypeptide, resulting in recombination between the recombination attachment sites, wherein the recombinase polypeptide can mediate recombination between the first and second recombination attachment sites, the first recombination attachment site is a phage genomic recombination attachment site (attP) or a bacterial genomic recombination attachment site (attB), the second recombination attachment site is attB or attP, and the recombinase is selected from the group consisting of a Listeria monocytogenes phage recombinase, a Streptococcus pyogenes phage recombinase, a Bacillus subtilis phage recombinase, a Mycobacterium tuberculosis phage recombinase and a Mycobacterium smegmatis phage recombinase, provided that when the first recombination attachment site is attB, the second recombination attachment site is attP, and when the first recombination attachment site is attP, the second recombination attachment site is attB. In an embodiment the recombinase is selected from the group consisting of an A118 recombinase, a SF370.1 recombinase, a SPβc2 recombinase, a ϕRv1 recombinase, and a Bxb1 recombinase. In one embodiment the recombination results in integration.

[0547] c. Other Non-Viral Delivery Systems

[0548] In other embodiments, nucleic acids encoding one or more miRNA(s), a CAR, a cytokine, and/or a cell tag, can be integrated into the immune effector cell's DNA through gene editing systems that utilize CRISPR, TALEN or Zinc-Finger nucleases.

[0549] Regardless of the method used to introduce exogenous nucleic acids into a host cell, in order to confirm the presence of the recombinant DNA sequence in the host cell, a variety of assays can be performed. Such assays include, for example, “molecular biological” assays well known to those of skill in the art, such as Southern and Northern blotting, RT-PCR and PCR; “biochemical” assays, such as detecting the presence or absence of a particular peptide, e.g., by immunological means (ELISAs and Western blots) or by assays described herein to identify peptides or proteins or nucleic acids falling within the scope of the invention.

### IX. Engineered T-Cell Receptor (TCR)

[0550] In some embodiments, the chimeric receptor comprises an engineered T-cell receptor. The T cell receptor (TCR) is composed of two chains (aβ or γδ) that pair on the surface of the T cell to form a heterodimeric receptor. In some instances, the αβ TCR is expressed on most T cells in the body and is known to be involved in the recognition of specific MHC-restricted antigens. Each α and β chain are composed of two domains: a constant domain (C) that anchors the protein to the cell membrane and is associated with invariant subunits of the CD3 signaling apparatus; and a variable domain (V) that confers antigen recognition through six loops, referred to as complementarity determining regions (CDRs). In some instances, each of the V domains comprises three CDRs; e.g., CDR1, CDR2 and CDR3 with CDR3 as the hypervariable region. These CDRs interact with a complex formed between an antigenic peptide bound to a protein encoded by the major histocompatibility complex (pepMHC) (e.g., HLA-A, HLA-B, HLA-C, HLA-DPA1, HLA-DPB1, HLA-DQA1, HLA-DQB1, HLA-DRA, or HLA-DRB1 complex). In some instances, the constant domain further comprises a joining region that connects the constant domain to the variable domain. In some cases, the beta chain further comprises a short diversity region which makes up part of the joining region.

[0551] Both the α and β chains are highly variable, although the T-cell receptor α chain contains a constant (preserved region), i.e., the Vα 24-Ja18 junction (amino acid sequence GSTLGR or a conservatively substituted amino acid sequence thereof).

[0552] In some cases, such TCR are reactive to specific tumor antigen, e.g. NY-ESO, Mage A3, Titin, MART-1, HPV, HBV, MAGE-A4, MAGE-A10, MAGE A3/A6, gp100, MAGE-A 1, or PRAME. In other cases, such TCR are reactive to specific neoantigens expressed within a patient's tumor (i.e. patient-specific, somatic, non-synonymous mutations expressed by tumors). In some cases, engineered TCRs can be affinity-enhanced.

[0553] In some embodiments, a TCR is described using the International Immunogenetics (IMGT) TCR nomenclature, and links to the IMGT public database of TCR sequences. For example, there can be several types of alpha chain variable (Vα) regions and several types of beta chain variable (Vβ) regions distinguished by their framework, CDR1, CDR2, and CDR3 sequences. As such, a Vα type can be referred to in IMGT nomenclature by a unique TRAV number. For example, “TRAV21” defines a TCR Vα region having unique framework and CDR1 and CDR2 sequences, and a CDR3 sequence, which is partly defined by an amino acid sequence which is preserved from TCR to TCR but which also includes an amino acid sequence which varies from TCR to TCR Similarly, “TRBV5-1” defines a TCR Vβ region having unique framework and CDR1 and CDR2 sequences, but with only a partly defined CDR3 sequence.

[0554] In some cases, the beta chain diversity region is referred to in IMGT nomenclature by the abbreviation TRBD.

[0555] In some instances, the unique sequences defined by the IMGT nomenclature are widely known and accessible to those working in the TCR field. For example, they can be found in the IMGT public database and in “T cell Receptor Factsbook”, (2001) LeFranc and LeFranc, Academic Press, ISBN 0-12-441352-8.

[0556] In some embodiments, an αβ heterodimeric TCR is, for example, transfected as full length chains having both cytoplasmic and transmembrane domains. In some cases, the TCRs contain an introduced disulfide bond between residues of the respective constant domains, as described, for example, in WO 2006/000830.

[0557] In some instances, TCRs described herein are in single chain format, for example see WO 2004/033685. Single chain formats include αβ TCR polypeptides of the Vα-L-Vβ, Vβ-L-Vα, Vα-Cα-L-Vβ, Vα-L-Vβ-Cβ, Vα-Cα-L-Vβ-Cβ types, wherein Vα and Vβ are TCR α and β variable regions respectively, Cα and Cβ are TCR α and β constant regions respectively, and L is a linker sequence. In certain embodiments single chain TCRs of the invention may have an introduced disulfide bond between residues of the respective constant domains, as described in WO 2004/033685.

[0558] In some embodiments, the TCR can be an αβ TCR. In some embodiments, the TCR can be a γδ TCR. It should be understood that a TCR of the present disclosure can bind to any of the antigen targets described herein.

[0559] In some embodiments, the TCR may be any one of the Vδ1, Vδ2, and Vδ1negVδ2neg TCR subsets. In some embodiments, the engineered cell may express any combination of a Vδ1, Vδ2, Vδ3, Vδ5, Vδ7, or Vδ8 TCR chain with a Vγ2, Vγ3, Vγ7, Vγ8, Vγ9, Vγ10, or Vγ11 TCR chain. In some embodiments, the engineered cell may have essentially identical genetic material. In one aspect, the engineered cell may not contain a chimeric antigen receptor.

[0560] The TCR described herein may be associated with a detectable label, a therapeutic agent or a PK modifying moiety. Exemplary detectable labels for diagnostic purposes include, but are not limited to, fluorescent labels, radiolabels, enzymes, nucleic acid probes and contrast reagents.

[0561] In some cases, each chain of TCR disclosed herein, for example αβ or γδ, comprises a modified spacer region connecting the constant region of a TCR chain to the transmembrane region. In some cases, a spacer region of each chain of TCR disclosed herein comprises 1) a stalk region and 1 or more stalk extension region(s) adjacent to said stalk region. The stalk and stalk extension regions may, for example, be those as previously described for use in chimeric antigen receptors. In some embodiments, each chain of TCR disclosed herein incorporates a spacer that comprises a stalk region (s) and up to 20 stalk extension regions.

[0562] In some instances, the stalk region comprises the extracellular hinge region from TCRα or TCRβ chain or the stalk region comprises a sequence with at least 80% homology to the extracellular hinge region from TCRα or TCRβ chain. In alternative instances, the stalk region comprises any portion of extracellular region of TCRα or TCRβ constant region with at least 80% homology to the extracellular region of TCRα or TCRβ constant region respectively. For example, the stalk region can comprise a sequence with at least 80%, 85%, 90%, 95%, or greater than 95% homology to the any portion of extracellular region of TCRα or TCRβ constant region.

[0563] TCR chain heterodimers are formed by inter-chain disulfide bonds in extracellular hinge region of a and (3 chains. In some embodiments, the stalk region comprises a dimerization site. A dimerization site can comprise a disulfide bond formation site. A dimerization site can comprise cysteine residue(s). A stalk region can be capable of forming a disulfide bond. Such a disulfide bond can be formed at a disulfide bond forming site or a dimerization site. In some examples, the dimerization occurs between a and (3 chains of TCR.

[0564] In some embodiments, a stalk extension region is used to link the stalk region to the transmembrane region TCR α and (3 chains. In certain embodiments, a stalk extension region is used to link the stalk region to constant region of TCR α and β chains. In certain embodiments, the stalk region and the stalk extension region(s) can be connected via a linker.

[0565] In some instances, the stalk extension domain comprises a sequence that is partially homologous to the stalk region. In some instances, each of the stalk extension region comprises a sequence that is homologous to the stalk region, except that the stalk extension region lacks the dimerization site of the stalk region. In some cases, each of the stalk extension region comprises a sequence identical to the stalk region. In other cases, each of the stalk extension regions comprise a sequence identical to the stalk region with at least one amino acid residue substitution relative to the stalk region. In some cases, each of the stalk extension region is not capable of forming a disulfide bond or is not capable of dimerization with a homologous stalk extension region.

[0566] In other embodiments, one stalk extension region can be connected to another stalk extension region via a linker. Examples of such linkers can include glycine-serine rich linkers.

[0567] In some embodiments, the addition of stalk extension region(s) prevents mispairing of transgenic TCR α and β chains with native TCR α and β chains expressed by T cells that are genetically modified.

[0568] In some embodiments, a modified immune effector cell of the present disclosure can comprise a TCR of the present disclosure and a cytokine of the present disclosure. In certain embodiments, the modified immune effector cell can comprise a TCR and a fusion protein comprising IL-15 and IL-15Rα, or a fusion protein comprising functional fragments or variants of such domains.

### X. Immune Checkpoint Inhibitors

[0569] In some embodiments, an engineered cell of the present disclosure can include an immune checkpoint inhibitor. In certain embodiments, a polynucleotide of the present disclosure can further encode an immune checkpoint inhibitor. In certain embodiments, an engineered cell of the present disclosure can comprise such a polynucleotide.

[0570] In certain embodiments, the immune checkpoint inhibitor can be an antibody or a functional fragment or variant thereof. In certain embodiments, the immune checkpoint inhibitor can inhibit the activity of an immune checkpoint protein such as PD1, PD-L1, CTLA-4, TIGIT, 4-1BB, PIK3IP1, CD27, CD28, CD40, CD70, CD122, CD137, OX40 (CD134), GITR, ICOS, A2AR, B7-H₃ (CD276), B7-H₄ (VTCN1), BTLA, IDO, KIR, LAGS, TIM-3, or VISTA.

[0571] In some embodiments, the immune checkpoint inhibitor can be an anti-CTLA-4 antibody. The anti-CTLA-4 antibody (e.g., ipilimumab) has shown durable anti-tumor activities and prolonged survival in participants with advanced melanoma, resulting in its Food and Drug Administration (FDA) approval in 2011. See Hodi et al., Improved survival with ipilimumab in patients with metastatic melanoma. N Engl J Med. (2010) Aug. 19; 363(8):711-23. In some embodiments, the one or more checkpoint inhibitors can be an anti-PD-L1 antibody. In some embodiments, the anti-PD-L1 antibody can be a full-length atezolizumab (anti-PD-L1), avelumab (anti-PD-L1), durvalumab (anti-PD-L1), or a fragment or a variant thereof. In some embodiments, the one or more checkpoint inhibitors can be any one or more of CD27 inhibitor, CD28 inhibitor, CD40 inhibitor, CD122 inhibitor, CD137 inhibitor, OX40 (also known as CD134) inhibitor, GITR inhibitor, ICOS inhibitor, or any combination thereof. In some embodiments, the one or more checkpoint inhibitors can be any one or more of A2AR inhibitor, B7-H₃ (also known as CD276) inhibitor, B7-H₄ (also known as VTCN1) inhibitor, BTLA inhibitor, IDO inhibitor, KIR inhibitor, LAG3 inhibitor, TIM-3 inhibitor, VISTA inhibitor, or any combination thereof.

[0572] In some embodiments, the immune checkpoint inhibitor is an anti-PD-L1 antibody, an anti-CTLA-4 antibody, an anti-CD28 antibody, an anti-TIGIT antibody, an anti-LAG3 antibody, an anti-TIM3 antibody, an anti-GITR antibody, an anti-4-1BB antibody, or an anti-OX-40 antibody. In some embodiments, the additional therapeutic agent is an anti-TIGIT antibody. In some embodiments, the immune checkpoint inhibitor is an anti-PD-L1 antibody selected from the group consisting of: BMS935559 (MDX-1105), atexolizumab (MPDL3280A), durvalumab (MEDI4736), and avelumab (MSB0010718C). In some embodiments, the immune checkpoint inhibitor is an anti-CTLA-4 antibody selected from the group consisting of: ipilimumab (YERVOY) and tremelimumab. In some embodiments, the additional therapeutic agent is an anti-LAG-3 antibody selected from the group consisting of: BMS-986016 and LAG525. In some embodiments, the immune checkpoint inhibitor is an anti-OX-40 antibody selected from the group consisting of: MEDI6469, MEDI0562, and MOXR0916. In some embodiments, the additional therapeutic agent is an anti-4-1BB antibody selected from the group consisting of: PF-05082566.

[0573] In some embodiments, the engineered cell can include an immune checkpoint inhibitor comprising a PD1-binding moiety. In some embodiments, the PD1-binding moiety (referred to herein as an “anti-PD-1”) is selected from an antibody identified in Table 8 (below), or a functional fragment or variant thereof.

TABLE 8
PD-1 Antibodies

| Name | Also Known as | Company | Reference(s) |
|---|---|---|---|
| cemiplimab | Libtayo, cemiplimab. | Regeneron, Sanofi | WO 2015/112800 |
| | REGN2810 | | |
| pembrolizumab | Keytruda, MK-3475, | Merck (MSD), | WO 2008/156712, |
| | SCH 900475, | Schering-Plough | U.S. Pat. No. 8,354,509. |
| | lambrolizumab | | U.S. Pat. No. 8,952,136, |
| | | | U.S. Pat. No. 8,900,587 |
| nivolumab | Opdivo, ONO-4538, | BMS, Medarex, Ono | U.S. Pat. No. 8,728,474. |
| | MDX-1106, BMS- | | U.S. Pat. No. 8,779,105, |
| | 936558, 5C4 | | U.S. Pat. No. 8.008,449, |
| | | | U.S. Pat. No. 9,067,999, |
| | | | U.S. Pat. No. 9,073,994 |
| toripalimab | JS001, JS-001, TAB001, | Junmeng Biosciences, | Si-Yang Liu et al., J. |
| | triprizumab | Shanghai Junshi, | Hematol. Oncol. 10: 136 |
| | | TopAlliance Bio | (2017) |
| sintilimab | Tyvyt, IBI308 | Adimab, Innovent, | WO 2017/024465, WO |
| | | Lilly | 2017/025016, WO |
| | | | 2017/132825, WO |
| | | | 2017/133540 |
| LY3434172 | — | Lilly, Zymeworks | ClinicalTrials.gov |
| | | | Identifier: NCT03936959 |
| JTX-4014 | — | Jounce Therapeutics | U.S. 2018/0118829; |
| | | Inc. | ClinicalTrials.gov |
| | | | Identifier: NCT03790488; |
| | | | Papdopolous et al., Cancer |
| | | | Immunol Immunother |
| | | | 70(3): 763-772 (2021)) |
| 609 A | 609A | 3S Bio; Sunshine | ClinicalTrials.gov |
| | | Guojian Pharma | Identifier: NCT03998345 |
| Sym021 | — | Symphogen A/S | Gjetting et al., mAbs 11(4): |
| | | | 666-680 (2019 |
| LZM009 | — | Livzon Pharmaceutical | ClinicalTrials.gov |
| | | Group | Identifier: NCT03286296 |
| budigalimab | ABBV-181, PR- | Abbvie | Powderly et al., Annals of |
| | 1648817 | | Oncology 29(8) (2018); |
| | | | ClinicalTrials.gov |
| | | | Identifier: NCT03000257 |
| IB | IBI-318 | Innovent, Lilly | ClinicalTrials.gov |
| | | | Identifier: NCT03875157 |
| SCT-I10A | — | Sinocelltech Ltd. | ClinicalTrials.gov |
| | | | Identifier: NCT03821363 |
| SG001 | — | CSPC ZhongQi | ClinicalTrials.gov |
| | | Pharmaceutical | Identifier: NCT03852823 |
| | | Technology Co., Ltd. | |
| AMP-224 | GSK-2661380 | Astra Zeneca, Glaxo | Floudas et al., Clin. |
| | | Smith Kline | Colorectal Cancer 18(4) |
| | | | (2019) |
| AMG 404 | AMG404 | Amgen | ClinicalTrials.gov |
| | | | Identifier: NCT03853109 |
| AK112 | — | Akesobio Australia Pty | ClinicalTrials.gov |
| | | Ltd | Identifier: NCT04047290 |
| CS1003 | — | CStone Pharma | Li et al., Acta |
| | | | Pharmacologica Sinica 42: |
| | | | 142-148 (2021) |
| MEDI0680 | AMP-514 | Astra Zeneca, | WO 2012/145493, WO |
| | | Amplimmune, | 2014/194293 |
| | | Medimmune | |
| RO7121661 | — | Roche | ClinicalTrials.gov |
| | | | Identifier: NCT03708328 |
| F520 | — | Shandong New Time | ClinicalTrials.gov |
| | | Pharmaceutical Co. | Identifier: NCT03657381 |
| sasanlimab | PF-06801591, RN-888 | Pfizer | Cho et al., Annals of |
| | | | Oncology 30(5) (2019) |
| BI 754091 | BI754091 | Boehringer Ingelheim | Kang et al., J. Clin. |
| | | | Oncology 38(15) (2020) |
| cetrelimab | JNJ-63723283 | Janssen Biotech | Rutkowski et al., J. Clin. |
| | | | Oncology 37: 8 (2019) |
| HerinCAR-PD-1 | — | Ningbo Cancer | ClinicalTrials.gov |
| | | Hospital | Identifier: NCT02873390 |
| HX008 | — | Taizhou Hanzhong Bio | Zhang et al, mAbs 12(1) |
| | | | (2020); ClinicalTrials.gov |
| | | | Identifier: NCT03704246 |
| zimberelimab | WBP3055, GLS-010, | Arcus, Guangzhou | US 2019/0270815, Si- |
| | AB122 | Gloria Bio, Harbin | Yang Liu et al., J. |
| | | Gloria Pharma, WuXi | Hematol. Oncol. 10: 136 |
| | | Biologies | (2017) |
| retifanlimab | MGA012, | Incyte, MacroGenics | WO 2017/19846 |
| | INCMGA00012 | | |
| balstilimab | AGEN2034, AGEN- | Agenus, Ludwig Inst., | WO 2017/040790 |
| | 2034 | Sloan-Kettering | |
| pidilizumab | CT-011, hBat-1, | CureTech, Medivation, | Rosenblatt et al., J |
| | MDV9300 | Teva | Immunother. 34(5): 409- |
| | | | 418 (2011) |
| teripalimab | — | Henan Cancer Hospital | ClinicalTrials.gov |
| | | | Identifier: NCT03985670 |
| CBT-501 | GB226, GB 226, | CBT Pharmaceuticals, | ClinicalTrials.gov |
| | Genolimzumab, | Genor | Identifier: |
| | Genormab | | NCT03053466. |
| BAT1306 | — | Bio-Thera Solutions | Wu et al., J. Clin. Oncol. |
| | | | 37(4)(2019) |
| tislelizumab | BGB-A317 | BeiGene, Celgene | WO 2015/35606, |
| | | | US 2015/0079109 |
| AK105 | — | Akeso, HanX Bio | ClinicalTrials.gov |
| | | | Identifier: NCT03866967 |
| spartalizumab | PDR001, BAP049 | Dana-Farber, Novartis | WO 2015/112900; Lin et |
| | | | al., Ann. of Oncology, 29: 8 |
| | | | (2018) |
| prolgolimab | BCD-100 | Biocad | Kaplon et |
| | | | al., mAbs 10(2): 183-203 |
| | | | (2018) |
| serplulimab | HLX10 | Henlix Biotech | ClinicalTrials.gov |
| | | | Identifier: NCT04297995 |
| dostarlimab | ANB011, TSR-042, | AnaptysBio, Tesaro | WO 2014/179664 |
| | ABT1, WBP-285 | | |
| camrelizumab | SHR-1210 | Incyte, Jiangsu | WO 2015/085847; Si-Yang |
| | | Hengrui, Shanghai | Liu et al., J. Hematol. |
| | | Hengrui | Oncol. 10: 136(2017) |
| IBI319 | IBI-319 | Innovent Biologies | ClinicalTrials.gov |
| | | (Suzhou) Co. Ltd., | Identifier: NCT04708210 |
| | | Lilly | |
| KY1043 | — | Kymab | Van Krinks, Kymab poster |
| | | | no. P625, “KY1043, a |
| | | | novel PD-L1 IL-2 |
| | | | immunocytokine directed |
| | | | towards CD25, delivers |
| | | | potent anti-tumour activity |
| | | | in vitro and in vivo” |
| STI-1110 | — | Sorrento Therapeutics | WO 2014/194302 |
| CA05100948 | Antibody 948 | UCB Biopharma | U.S. Pat. No. 8.993,731 |
| Nb97 | MY2935, MY2626 | Fudan University, | Xian et al., Biochem. & |
| | | Novamab | Biophys. Res. Comm's |
| | | | 519(3), 267-273 (2019) |
| ENUM 388D4 | — | Enumeral | Scheuplein et al., |
| | | | Immunology, Abstract |
| | | | 4871 (2016) |
| hAb-10D3 | hAb-10D3 | BPS Bioscience | U.S. Pat. No. 10,759,859 |
| Unknown | — | Isis Innovation | WO 2010/029434 |
| ANB030 | — | AnaptysBio Inc. | Grebinoski et al., Current |
| | | | Opinion in Immunol. 67: 1- |
| | | | 9 (2020) |
| MCLA-134 | — | Merus N.V. | WO 2019/009727 |
| hAb21 | — | Suzhou Stainwei | U.S. 2020/0277376 |
| | | Biotech Inc. | |
| — | — | Ampsource | U.S. 2019/0367617 |
| — | — | Reyoung(Suzhou) | U.S. 2019/0071501 |
| | | Biology Science & | |
| | | Technology Co. | |
| — | — | Xencor, Inc. | WO 2018/071918 |
| — | — | Crown Bio science Inc. | WO 2016/014688 |
| — | — | Beijing Hanmi | U.S. 2020/0299412 |
| — | — | Beijing Hanmi | U.S. 2021/0032343 |
| — | — | Beijing Hanmi | U.S. 2019/0367615 |
| — | — | MabQuest | WO 2016/020856 |
| — | — | Fuso Pharma, | WO 2018/034226 |
| | | Hokkaido U. | |
| — | — | Eureka Therapeutics, | WO 2016/210129 |
| | | Inc., Sloan-Kettering | |
| — | — | Sutro Biopharma, Inc. | WO 2016/077397 |
| — | — | Y-Biologics | U.S. 2019/0248900 |
| — | — | Harbour Biomed Ltd. | WO 2017/016497 |
| — | — | Shanghai | Liu et al., Sci. Rep 9(1) |
| | | PharmaExplorer Co. | (2019) |
| — | — | Bio X Cell | Grasselly et al., Front |
| | | | Immunol 9: 2100 (2018) |
| — | — | Tongji University | Cai et al., Invest. New |
| | | | Drugs 37(5): 799-809 |
| | | | (2019) |
| — | — | Janssen Biotech | U.S. 2018/0355061 |
| — | — | Shanghai Henlius | U.S. 2019/0218295 |
| | | Biotech, Inc. | |
| — | — | Ultrahuman Nine Ltd. | WO 2019/170898 |
| — | — | CytomX | WO 2017/011580 |
| — | — | Nanjing Legend | WO 2017/133633 |
| | | Biotech | |
| — | — | Aduro Biotech | U.S. Pat. No. 10,494,436 |
| — | — | Sutro Biopharm | U.S. Pat. No. 10,822,414 |
| — | — | Versitech Ltd. | U.S. Pat. No. 10,047,137 |
| — | — | STCube & Co., | WO 2016/160792 |
| | | University of Texas | |
| — | — | Tayu Huaxia Biotech | U.S. 2019/0144543 |
| | | Medivcal Group Co. | |
| — | — | Hangzhou Sumgen | U.S. 2019/0016799 |
| | | Biotechnology | |
| — | — | Jiangsu Hengrui | WO 2015/085847 |
| | | Medicine Co, Shanghai | |
| | | Hengrui | |
| | | Pharmaceutical Co | |
| — | — | Salubris (Chengdu) | WO 2019/201169 |
| | | Biotech Co. | |
| — | — | Kadmon Corp. | U.S. Pat. No. 10,407,502 |
| — | — | Augusta University | WO 2019/051164 |
| | | Research Institute | |
| — | — | Abbvie Biotherapeutics | WO 2018/053106 |
| | | Inc. | |
| — | — | Lyvgen Biopharma | WO 2017/087599 |
| | | Holdings Ltd. | |
| — | — | Crescendo Biologies | WO 2018/127711 |
| | | Ltd. | |
| — | — | Zhejiang Teruisi | U.S. 2019/0322747 |
| | | Pharmaceutics Inc. | |
| — | — | Biosion Inc. | WO 2019/204132 |
| — | — | Celgene Corp. | U.S. 2017/0088618 |
| — | — | Asia Biotech Pte. Ltd. | WO 2017/058115 |
| — | — | The Brigham and | U.S. Pat. No. 10,934,352 |
| | | Women's Hospital | |
| — | — | Singapore Immunology | Seidel et al., Front. Oncol. |
| | | Network (SIgN), | 28 (2018) |
| | | Institute of Medical | |
| | | Biology, Agency for | |
| | | Science, Technology | |
| | | and Research | |
| | | (A*STAR) | |
| — | — | Chinese People | Sun et al., J Gastrointest |
| | | Liberation Army | Oncol. 11(6): 1421-1430 |
| | | General Hospital | (2020) |
| — | — | Immunomedics Inc. | U.S. Pat. No. 10,669,338 |
| — | — | Xiangtan Tenghua Bio | WO 2018/162944 |
| — | — | Beijing Dongfang | U.S. 2019/0144541 |
| | | Biotech | |
| — | — | REMD Biotherapeutics | WO 2018/119474 |
| — | — | Rinat Neuroscience | U.S. Pat. No. 10,155,037 |
| | | Corp. | |
| — | — | Medimmune, Wyeth | WO 2004/056875 |
| — | — | Fudan University | Yuan et al., Invest. New |
| | | | Drugs 39(1): 34-51 (2021) |

### XI. Gene Switch

[0574] Provided herein are gene switch polypeptides, polynucleotides encoding ligand-inducible gene switch polypeptides, and methods and systems incorporating these polypeptides and/or polynucleotides. The term “gene switch” refers to the combination of a response element associated with a promoter, and for instance, an ecdysone receptor (EcR) based system which, in the presence of one or more ligands, modulates the expression of a gene into which the response element and promoter are incorporated. Tightly regulated inducible gene expression systems or gene switches are useful for various applications such as gene therapy, large scale production of proteins in cells, cell based high throughput screening assays, functional genomics and regulation of traits in transgenic plants and animals. Such inducible gene expression systems can include ligand inducible heterologous gene expression systems.

[0575] In some embodiments, the polynucleotide or an additional polynucleotide encodes polypeptides for a gene switch system for ligand-inducible control of heterologous gene expression, wherein the gene switch polypeptides include: (a) a first gene switch polypeptide that comprises a DNA binding domain fused to a first nuclear receptor ligand binding domain; and (b) a second gene switch polypeptide that comprises a transactivation domain fused to a second nuclear receptor ligand binding domain; wherein the first gene switch polypeptide and the second gene switch polypeptide are connected by a linker.

[0576] In some embodiments, the gene switch system comprises: (a) a first gene switch polypeptide comprising a transactivation domain; (b) a second gene switch polypeptide comprising a DNA binding domain fused to a ligand binding domain; and (c) at least one heterologous polypeptide; wherein one of said first gene switch polypeptide, said second gene switch polypeptide and said heterologous polypeptide is connected by a linker to another one of said first gene switch polypeptide, said second gene switch polypeptide and said heterologous polypeptide, and wherein said polypeptide linker comprises a cleavable linker or ribosome skipping linker sequence.

[0577] The heterologous polypeptide may, for example, be a chimeric receptor (e.g., a CAR), a cell tag, or a cytokine as described herein.

[0578] In certain embodiments, the gene switch system is of the type described in WO 2018/132494.

[0579] In some embodiments, the DNA binding domain comprises at least one of GAL4 (GAL4 DBD), a LexA DBD, a transcription factor DBD, a steroid/thyroid hormone nuclear receptor superfamily member DBD, a bacterial LacZ DBD, and a yeast DBD. In other embodiments, the DNA binding domain comprises the amino acid sequence of SEQ ID NO: 638 or a functional fragment or variant thereof. In some embodiments, the transactivation domain comprises at least one of a VP16 transactivation domain and a B42 acidic activator transactivation domain. In other cases, the transactivation domain comprises an amino acid sequence as shown in SEQ ID NO: 632 or a functional fragment or variant thereof. In some embodiments, at least one of the first nuclear receptor ligand binding domain and the second nuclear receptor ligand binding domain comprises at least one of an ecdysone receptor (EcR), a ubiquitous receptor, an orphan receptor 1, a NER-1, a steroid hormone nuclear receptor 1, a retinoid X receptor interacting protein-15, a liver X receptor (3, a steroid hormone receptor like protein, a liver X receptor, a liver X receptor α, a farnesoid X receptor, a receptor interacting protein 14, and a farnesol receptor, or a functional fragment or variant thereof. In some embodiments, at least one of the first nuclear receptor ligand binding domain, the second nuclear receptor ligand binding domain, and the ligand binding domain is derived from the Ecdysone Receptor polypeptide sequence of SEQ ID NOs: 640 or 642 or a functional fragment or variant thereof. In some embodiments, the nuclear receptor ligand binding domain is a RxR domain of SEQ ID NO: 634 or a functional fragment or variant thereof.

[0580] In some embodiments, the polynucleotide encodes at least one of GAL4 (GAL4 DBD), a LexA DBD, a transcription factor DBD, a steroid/thyroid hormone nuclear receptor superfamily member DBD, a bacterial LacZ DBD, and a yeast DBD, or a functional fragment or variant thereof. In other embodiments, the DNA binding domain is encoded by a nucleotide sequence as shown in SEQ ID NO: 639 or a functional fragment or variant thereof. In some embodiments, the polynucleotide encodes at least one of a VP16 transactivation domain and a B42 acidic activator transactivation domain. In other cases, the transactivation domain is encoded by a nucleotide sequence as shown in SEQ ID NO: 633 or a functional fragment or variant thereof. In some embodiments, at least one of the first nuclear receptor ligand binding domain, the second nuclear receptor ligand binding domain, and the ligand binding domain is encoded by SEQ ID NO: 641 or 643 or a functional fragment or variant thereof. In some embodiments, at least one of the first nuclear receptor ligand binding domain, the second nuclear receptor ligand binding domain, and the ligand binding domain is encoded by SEQ ID NO: 635 or a functional fragment or variant thereof.

[0581] In yet another embodiment, the first gene switch polypeptide comprises a GAL4 DBD, or a functional fragment or variant thereof, fused to an EcR nuclear receptor ligand binding domain, or a functional fragment or variant thereof, and the second gene switch polypeptide comprises a VP16 transactivation domain, or a functional fragment or variant thereof, fused to a retinoid receptor X (RXR) nuclear receptor ligand binding domain, or a functional fragment or variant thereof. In some cases, the first gene switch polypeptide and the second gene switch polypeptide are connected by a linker, which is selected from the group consisting of 2A, GSG-2A, GSG linker (SEQ ID NO: 531), SGSG linker (SEQ ID NO: 533), furinlink variants and derivatives thereof.

[0582] In some cases, at least one of the first nuclear receptor ligand binding domain and the second nuclear receptor ligand binding domain comprise any one of amino acid sequences as shown in SEQ ID NOs: 640 or 642 or a functional fragment or variant thereof. In some embodiments, the first gene switch polypeptide comprises a GAL4 DBD, or a functional fragment or variant thereof, fused to an EcR nuclear receptor ligand binding domain, or a functional fragment or variant thereof, and the second gene switch polypeptide comprises a VP16 transactivation domain, or a functional fragment or variant thereof, fused to a retinoid receptor X (RXR) nuclear receptor ligand binding domain, or a functional fragment or variant thereof. In some embodiments, the Gal4 DBD, or a functional fragment or variant thereof, fused to the EcR nuclear receptor ligand binding domain, or a functional fragment or variant thereof, comprises an amino acid sequence as shown in SEQ ID NOs: 644 or 646, or a functional fragment or variant thereof, and the VP16 transactivation domain, or a functional fragment or variant thereof, fused to the retinoid receptor X (RXR) nuclear receptor ligand binding domain, or a functional fragment or variant thereof, comprises an amino acid sequence as shown in SEQ ID NO: 636, or a functional fragment or variant thereof.

[0583] In some cases, at least one of the first nuclear receptor ligand binding domain and the second nuclear receptor ligand binding domain are encoded by the amino acid sequences as shown in SEQ ID NOs: 641 or 643, or a functional fragment or variant thereof. In some embodiments, the Gal4 DBD, or a functional fragment or variant thereof, fused to the EcR nuclear receptor ligand binding domain, or a functional fragment or variant thereof, is encoded by the nucleotide sequence as shown in SEQ ID NOs: 645 or 647, or a functional fragment or variant thereof, and the VP16 transactivation domain, or a functional fragment or variant thereof, fused to the retinoid receptor X (RXR) nuclear receptor ligand binding domain, or a functional fragment or variant thereof, is encoded by the nucleotide sequence of SEQ ID NO: 637, or a functional fragment or variant thereof.

[0584] In any of the foregoing gene switch embodiments, the linker can be a cleavable linker, a ribosome skipping linker sequence or an IRES linker. In some cases, the linker is an IRES linker and is encoded by a nucleic acid comprising the sequence of SEQ ID NOs: 702 or 703 or a functional fragment or variant thereof. In other cases, the linker is a cleavable linker or ribosome skipping linker sequence. In some embodiments, the cleavable linker or the ribosome skipping linker sequence comprises one or more of a 2A linker, p2A linker, T2A linker, F2A linker, E2A linker, GSG-2A linker, GSG linker, SGSG linker, furinlink linker variants and derivatives thereof. In other embodiments, the cleavable linker or said ribosome skipping linker sequence has a sequence as shown in any one of SEQ ID NOs: 527, 529, 531, 533, 535, 537, 539, 541, 543, 545, 547, 549, 551, 553, 555, 557 and 559 or is encoded by the sequence as shown in any one of SEQ ID NOs: 528, 530, 532, 534, 536, 538, 540, 542, 544, 546, 548, 550, 552, 554, 556, 558, and 560.

[0585] In any of the gene switch embodiments, expression of at least one of the first gene switch polypeptide, the second gene switch polypeptide, the antigen-binding polypeptide, and the heterologous polypeptide of any of the compositions as provided herein can be modulated by a promoter, where the promoter is a tissue-specific promoter or an EF1A promoter or functional fragment or variant thereof. In some cases, the promoter comprises the sequence of SEQ ID NOs: 58 and 59 of WO 2018/132494, or a functional fragment or variant thereof. In other cases, the promoter is a tissue-specific promoter comprising a T-cell-specific response element. In another case, the tissue-specific promoter comprises one or more NFAT response element(s). In yet another case, the NFAT response element has a sequence of any one of SEQ ID NOs: 51 to 57 of WO 2018/132494 or a functional fragment or variant thereof.

[0586] In an embodiment, expression of the at least one heterologous polypeptide is modified by an inducible promoter. In some embodiments, the inducible promoter has a sequence of any one of SEQ ID NOs: 40 to 64 of WO 2018/132494 or a functional fragment or variant thereof. In other embodiments, the inducible promoter is modulated by at least one of the first gene switch polypeptide and the second gene switch polypeptide.

[0587] It should be understood that any of the foregoing polynucleotides can be included in a vector as described herein.

[0588] Also provided herein is a method of regulating the expression of a heterologous gene in an effector cell, the method comprising: (a) introducing into the effector cell one or more polynucleotides encoding the polypeptides of the first and second gene switch polypeptides as described herein and the heterologous polypeptide; and (b) contacting the effector cell with a ligand in an amount sufficient to induce expression of the gene encoding the heterologous polypeptide.

[0589] In certain embodiments, the ligand in the method of regulating the expression of the heterologous gene in the effector cell as provided herein comprises at least one of: (2S,3R,5R,9R,10R,13R,14S,17R)-17-[(2S,3R)-3,6-dihydroxy-6-methylheptan-2-yl]-2,3,14-trihydroxy-10,13-dimethyl-2,3,4,5,9,11,12,15,16,17-decahydro-1H-cyclopenta[a]phenanthren-6-one; N′-(3,5-Dimethylbenzoyl)-N′-[(3R)-2,2-dimethyl-3-hexanyl]-2-ethyl-3-methoxybenzohydrazide; 5-Methyl-2,3-dihydro-benzo[1,4] dioxine-6-carboxylic acid N′-(3,5-dimethyl-benzoyl)-N′-(1-ethyl-2,2-dimethyl-propyl)-hydrazide; 5-Methyl-2,3-dihydro-benzo [1,4] dioxine-6-carboxylic acid N′-(3,5-dimethoxy-4-methyl-benzoyl)-N′-(1-ethyl-2,2-dimethyl-propyl)-hydrazide; 5-Methyl-2,3-dihydro-benzo[1,4]dioxine-6-carboxylic acid N′-(1-tert-butyl-butyl)-N′-(3,5-dimethyl-benzoyl)-hydrazide; 5-Methyl-2,3-dihydro-benzo[1,4]dioxine-6-carboxylic acid N′-(1-tert-butyl-butyl)-N′-(3,5-dimethoxy-4-methyl-benzoyl)-hydrazide; 5-Ethyl-2,3-dihydro-benzo[1,4]dioxine-6-carboxylic acid N′-(3,5-dimethyl-benzoyl)-N′-(1-ethyl-2,2-dimethyl-propyl)-hydrazide; 5-Ethyl-2,3-dihydro-benzo[1,4]dioxine-6-carboxylic acid N′-(3,5-dimethoxy-4-methyl-benzoyl)-N ‘-(1-ethyl-2,2-dimethyl-propyl)-hydrazide; 5-Ethyl-2,3-dihydro-benzo[1,4]dioxine-6-carboxylic acid N’-(1-tert-butyl-butyl)-N ‘-(3,5-dimethyl-benzoyl)-hydrazide; 5-Ethyl-2,3-dihydro-benzo[1,4]dioxine-6-carboxylic acid N’-(1-tert-butyl-butyl)-N ‘-(3,5-dimethoxy-4-methyl-benzoyl)-hydrazide; 3,5-Dimethyl-benzoic acid N-(1-ethyl-2,2-dimethyl-propyl)-N’-(3-methoxy-2-methyl-benzoyl)-hydrazide; 3,5-Dimethoxy-4-methyl-benzoic acid N-(1-ethyl-2,2-dimethyl-propyl)-N′-(3-methoxy-2-methyl-benzoyl)-hydrazide; 3,5-Dimethyl-benzoic acid N-(1-tert-butyl-butyl)-N′-(3-methoxy-2-methyl-benzoyl)-hydrazide; 3,5-Dimethoxy-4-methyl-benzoic acid N-(1-tert-butyl-butyl)-N′-(3-methoxy-2-methyl-benzoyl)-hydrazide; 3,5-Dimethyl-benzoic acid N-(1-ethyl-2,2-dimethyl-propyl)-N′-(2-ethyl-3-methoxy-benzoyl)-hydrazide; 3,5-Dimethoxy-4-methyl-benzoic acid N-(1-ethyl-2,2-dimethyl-propyl)-N′-(2-ethyl-3-methoxy-benzoyl)-hydrazide; 3,5-Dimethyl-benzoic acid N-(1-tert-butyl-butyl)-N′-(2-ethyl-3-methoxy-benzoyl)-hydrazide; 3,5-Dimethoxy-4-methyl-benzoic acid N-(1-tert-butyl-butyl)-N′-(2-ethyl-3-methoxy-benzoyl)-hydrazide; 2-Methoxy-nicotinic acid N-(1-tert-butyl-pentyl)-N′-(4-ethyl-benzoyl)-hydrazide; 3,5-Dimethyl-benzoic acid N-(2,2-dimethyl-1-phenyl-propyl)-N′-(4-ethyl-benzoyl)-hydrazide; 3,5-Dimethyl-benzoic acid N-(1-tert-butyl-pentyl)-N′-(3-methoxy-2-methyl-benzoyl)-hydrazide; and 3,5-Dimethoxy-4-methyl-benzoic acid N-(1-tert-butyl-pentyl)-N′-(3-methoxy-2-methyl-benzoyl)-hydrazide.

[0590] In some cases, the expression of the gene encoding the polypeptide in the effector cell as provided herein is reduced or eliminated in the absence of the ligand, as compared to the expression in the presence of the ligand. In certain cases, the expression of said heterologous polypeptide is restored by providing additional amounts of the ligand.

[0591] In some embodiments, the one or more expression cassettes of the gene switch system further comprise one or more of the following: (a) one or more recombinase attachment sites; and (b) a sequence encoding a serine recombinase. In other embodiments, the one or more expression cassettes further comprise one or more of the following: (a) a non-inducible promoter; and (b) an inducible promoter.

[0592] In some embodiments, one of the first and second gene switch polypeptides can be connected to the heterologous polypeptide by a linker.

[0593] In some embodiments, the first and second gene switch polypeptides are connected by a polypeptide linker that is an IRES linker.

[0594] In some embodiments, the expression cassette can further comprise a second gene encoding a second heterologous polypeptide.

[0595] In some embodiments, the gene switch system as provided is for integrating a heterologous gene in a host cell, wherein upon contacting the host cell with the one or more expression cassettes in the presence of the serine recombinase and the one or more recombinase attachment sites, the heterologous gene is integrated in the host cell. In certain embodiments, the gene switch system further comprises a ligand, wherein the heterologous gene is expressed in the host cell upon contact of the host cell by the ligand. In certain embodiments, the one or more recombinase attachment sites can comprise a phage genomic recombination attachment site (attP) or a bacterial genomic recombination attachment site (attB). In some cases, the serine recombinase can be SF370.

[0596] In some cases, the expression cassette has the sequence of any one of SEQ ID NOs: 131 to 126 of WO 2018/132494 or a functional fragment or variant thereof.

[0597] In certain embodiments, the inducible promoter of the gene switch system can be activated by the transactivation domain. It should be understood that the gene switch system can be included in a single vector or in multiple vectors.

[0598] An early version of EcR-based gene switch used Drosophila melanogaster EcR (DmEcR) and Mus musculus RXR (MmRXR) polypeptides and showed that these receptors in the presence of steroid, ponasteroneA, transactivate reporter genes in mammalian cell lines and transgenic mice (Christopherson et al., 1992; No et al., 1996). Later, Suhr et al., 1998 showed that non-steroidal ecdysone agonist, tebufenozide, induced high level of transactivation of reporter genes in mammalian cells through Bombyx mori EcR (BmEcR) in the absence of exogenous heterodimer partner.

[0599] International Patent Applications No. PCT/US97/05330 (WO 97/38117) and PCT/US99/08381 (WO99/58155) disclose methods for modulating the expression of an exogenous gene in which a DNA construct comprising the exogenous gene and an ecdysone response element is activated by a second DNA construct comprising an ecdysone receptor that, in the presence of a ligand therefor, and optionally in the presence of a receptor capable of acting as a silent partner, binds to the ecdysone response element to induce gene expression. In this example, the ecdysone receptor was isolated from Drosophila melanogaster. Typically, such systems require the presence of the silent partner, preferably retinoid X receptor (RXR), in order to provide optimum activation. In mammalian cells, insect ecdysone receptor (EcR) is capable of heterodimerizing with mammalian retinoid X receptor (RXR) and, thereby, be used to regulate expression of target genes or heterologous genes in a ligand dependent manner. International Patent Application No. PCT/US98/14215 (WO 99/02683) discloses that the ecdysone receptor isolated from the silk moth Bombyx mori is functional in mammalian systems without the need for an exogenous dimer partner.

[0600] U.S. Pat. No. 6,265,173 discloses that various members of the steroid/thyroid superfamily of receptors can combine with Drosophila melanogaster ultraspiracle receptor (USP) or fragments thereof comprising at least the dimerization domain of USP for use in a gene expression system. U.S. Pat. No. 5,880,333 discloses a Drosophila melanogaster EcR and ultraspiracle (USP) heterodimer system used in plants in which the transactivation domain and the DNA binding domain are positioned on two different hybrid proteins. In each of these cases, the transactivation domain and the DNA binding domain (either as native EcR as in International Patent Application No. PCT/US98/14215 or as modified EcR as in International Patent Application No. PCT/US97/05330) were incorporated into a single molecule and the other heterodimeric partners, either USP or RXR, were used in their native state.

[0601] International Patent Application No. PCT/US01/0905 discloses an ecdysone receptor-based inducible gene expression system in which the transactivation and DNA binding domains are separated from each other by placing them on two different proteins results in greatly reduced background activity in the absence of a ligand and significantly increased activity over background in the presence of a ligand. This two-hybrid system is a significantly improved inducible gene expression modulation system compared to the two systems disclosed in applications PCT/US97/05330 and PCT/US98/14215. The two-hybrid system is believed to exploit the ability of a pair of interacting proteins to bring the transcription activation domain into a more favorable position relative to the DNA binding domain such that when the DNA binding domain binds to the DNA binding site on the gene, the transactivation domain more effectively activates the promoter (see, for example, U.S. Pat. No. 5,283,173). The two-hybrid gene expression system comprises two gene expression cassettes; the first encoding a DNA binding domain fused to a nuclear receptor polypeptide, and the second encoding a transactivation domain fused to a different nuclear receptor polypeptide. In the presence of ligand, it is believed that a conformational change is induced which promotes interaction of the antibody with the TGF-β cytokine trap, thereby resulting in dimerization of the DNA binding domain and the transactivation domain. Since the DNA binding and transactivation domains reside on two different molecules, the background activity in the absence of ligand is greatly reduced.

[0602] Certain modifications of the two-hybrid system could also provide improved sensitivity to non-steroidal ligands for example, diacylhydrazines, when compared to steroidal ligands for example, ponasterone A (“PonA”) or muristerone A (“MurA”). That is, when compared to steroids, the non-steroidal ligands provided higher gene transcription activity at a lower ligand concentration. Furthermore, the two-hybrid system avoids some side effects due to overexpression of RXR that can occur when unmodified RXR is used as a switching partner. In a preferred two-hybrid system, native DNA binding and transactivation domains of EcR or RXR are eliminated and as a result, these hybrid molecules have less chance of interacting with other steroid hormone receptors present in the cell, thereby resulting in reduced side effects.

[0603] The ecdysone receptor (EcR) is a member of the nuclear receptor superfamily and is classified into subfamily 1, group H (referred to herein as “Group H nuclear receptors”). The members of each group share 40-60% amino acid identity in the E (ligand binding) domain (Laudet et al., A Unified Nomenclature System for the Nuclear Receptor Subfamily, 1999; Cell 97: 161-163). In addition to the ecdysone receptor, other members of this nuclear receptor subfamily 1, group H include: ubiquitous receptor (UR), Orphan receptor 1 (OR-1), steroid hormone nuclear receptor 1 (NER-1), RXR interacting protein-15 (RIP-15), liver x receptor β (LXRβ), steroid hormone receptor like protein (RLD-1), liver x receptor (LXR), liver x receptor α (LXRα), farnesoid x receptor (FXR), receptor interacting protein 14 (RIP-14), and farnesol receptor (HRR-1).

[0604] In some cases, an inducible promoter (“IP”) can be a small molecule ligand-inducible two polypeptide ecdysone receptor-based gene switch, such as Intrexon Corporation's RHEOSWITCH® gene switch. In some cases, a gene switch can be selected from ecdysone-based receptor components as described in, but without limitation to, any of the systems described in: PCT/US2001/009050 (WO 2001/070816); U.S. Pat. Nos. 7,091,038; 7,776,587; 7,807,417; 8,202,718; PCT/US2001/030608 (WO 2002/029075); U.S. Pat. Nos. 8,105,825; 8,168,426; PCT/US52002/005235 (WO 2002/066613); U.S. application Ser. No. 10/468,200 (U.S. Pub. No. 20120167239); PCT/US2002/005706 (WO 2002/066614); U.S. Pat. Nos. 7,531,326; 8,236,556; 8,598,409; PCT/US2002/005090 (WO 2002/066612); U.S. Pat. No. 8,715,959 (U.S. Pub. No. 20060100416); PCT/US2002/005234 (WO 2003/027266); U.S. Pat. Nos. 7,601,508; 7,829,676; 7,919,269; 8,030,067; PCT/US2002/005708 (WO 2002/066615); U.S. application Ser. No. 10/468,192 (U.S. Pub. No. 20110212528); PCT/US2002/005026 (WO 2003/027289); U.S. Pat. Nos. 7,563,879; 8,021,878; 8,497,093; PCT/US2005/015089 (WO 2005/108617); U.S. Pat. Nos. 7,935,510; 8,076,454; PCT/US2008/011270 (WO 2009/045370); U.S. application Ser. No. 12/241,018 (U.S. Pub. No. 20090136465); PCT/US2008/011563 (WO 2009/048560); U.S. application Ser. No. 12/247,738 (U.S. Pub. No. 20090123441); PCT/US2009/005510 (WO 2010/042189); U.S. application Ser. No. 13/123,129 (U.S. Pub. No. 20110268766); PCT/US2011/029682 (WO 2011/119773); U.S. application Ser. No. 13/636,473 (U.S. Pub. No. 20130195800); PCT/US2012/027515 (WO 2012/122025); WO 2018/132494 (PCT/US2018/013196); and, U.S. Pat. No. 9,402,919.

[0605] As used herein, the term “ligand,” as applied to ligand-activated ecdysone receptor-based gene switches are small molecules of varying solubility (such as diacylhydrazine compounds) having the capability of activating a gene switch to stimulate gene expression (i.e., therein providing ligand inducible expression of polynucleotides (e.g., mRNAs, miRNAs, etc) and/or polypeptides). Examples of such ligands include, but are not limited to those described in: WO 2004/072254 (PCT/US2004/003775); WO 2004/005478 (PCT/US2003/021149); WO 2005/017126 (PCT/US2004/005149); WO 2004/078924 (PCT/US2004/005912); WO 2008/153801 (PCT/US2008/006757); WO 2009/114201 (PCT/US2009/001639); WO 2013/036758 (PCT/US2012/054141); WO 2014/144380 (PCT/US2014/028768); and, WO 2016/044390 (PCT/US2015/050375).

[0606] Examples of ligands also include, without limitation, an ecdysteroid, such as ecdysone, 20-hydroxyecdysone, ponasterone A, muristerone A, and the like, 9-cis-retinoic acid, synthetic analogs of retinoic acid, N, N′-diacylhydrazines such as those disclosed in U.S. Pat. Nos. 6,258,603; 6,013,836; 5,117,057; 5,530,028; 5,378,726; 7,304,161; 7,851,220; 8,748,125; 9,272,986; 7,456,315; 7,563,928; 8,524,948; 9,102,648; 9,169,210; 9,255,273; and, 9,359,289; oxadiazolines as described in U.S. Pat. Nos. 8,669,072; and, 8,895,306; dibenzoylalkyl cyanohydrazines such as those disclosed in European Application No. 2,461,809; N-alkyl-N,N′-diaroylhydrazines such as those disclosed in U.S. Pat. No. 5,225,443; N-acyl-N-alkylcarbonylhydrazines such as those disclosed in European Application No. 234,994; N-aroyl-N-alkyl-N′-aroylhydrazines such as those described in U.S. Pat. No. 4,985,461; amidoketones such as those described in U.S. Pat. Nos. 7,375,093; 8,129,355; and, 9,802,936; and other similar materials including 3,5-di-tert-butyl-4-hydroxy-N-isobutyl-benzamide, 8-O-acetylharpagide, oxysterols, 22(R) hydroxycholesterol, 24(S) hydroxycholesterol, 25-epoxycholesterol, T0901317, 5-alpha-6-alpha-epoxycholesterol-3-sulfate (ECHS), 7-ketocholesterol-3-sulfate, famesol, bile acids, 1,1-biphosphonate esters, juvenile hormone III, and the like. Examples of diacylhydrazine ligands useful in the present invention include RG-115819 (3,5-Dimethyl-benzoic acid N-(1-ethyl-2,2-dimethyl-propyl)-N′-(2-methyl-3-methoxybenzoyl)-hydrazide), RG-115932 ((R)-3,5-Dimethyl-benzoic acid N-(1-tert-butyl-butyl)N′-(2-ethyl-3-methoxy-benzoyl)-hydrazide), and RG-115830 (3,5-Dimethyl-benzoic acid N-(1-tert-butyl-butyl)-N′-(2-ethyl-3-methoxy-benzoyl)-hydrazide). See, e.g., WO 2008/153801 (PCT/US2008/006757); and, WO 2013/036758 (PCT/US2012/054141).

[0607] For example, a ligand for the ecdysone receptor-based gene switch may be selected from any suitable ligands. Both naturally occurring ecdysone or ecdysone analogs (e.g., 20-hydroxyecdysone, muristerone A, ponasterone A, ponasterone B, ponasterone C, 26-iodoponasterone A, inokosterone or 26-mesylinokosterone) and non-steroid inducers may be used as a ligand for gene switch of the present invention. U.S. Pat. No. 6,379,945, describes an insect steroid receptor isolated from Heliothis virescens (“HEcR”) which is capable of acting as a gene switch responsive to both steroid and certain non-steroidal inducers. Non-steroidal inducers have a distinct advantage over steroids, in this and many other systems which are responsive to both steroids and non-steroid inducers, for several reasons including, for example: lower manufacturing cost, metabolic stability, absence from insects, plants, or mammals, and environmental acceptability. U.S. Pat. No. 6,379,945 describes the utility of two dibenzoylhydrazines, 1,2-dibenzoyl-1-tert-butyl-hydrazine and tebufenozide (N-(4-ethylbenzoyl)-N′-(3,5-dimethylbenzoyl)-N′-tert-butyl-hydrazine) as ligands for an ecdysone-based gene switch. Also included in the present invention as a ligand are other dibenzoylhydrazines, such as those disclosed in U.S. Pat. No. 5,117,057. Use of tebufenozide as a chemical ligand for the ecdysone receptor from Drosophila melanogaster is also disclosed in U.S. Pat. No. 6,147,282. Additional, non-limiting examples of ecdysone ligands are 3,5-di-tert-butyl-4-hydroxy-N-isobutyl-benzamide, 8-O-acetylharpagide, a 1,2-diacyl hydrazine, an N′-substituted-N,N′-disubstituted hydrazine, a dibenzoylalkyl cyanohydrazine, an N-substituted-N-alkyl-N,N-diaroyl hydrazine, an N-substituted-N-acyl-N-alkyl, carbonyl hydrazine or an N-aroyl-N′-alkylN′-aroyl hydrazine. (See U.S. Pat. No. 6,723,531).

[0608] In one embodiment, the ligand for an ecdysone-based gene switch system is a diacylhydrazine ligand or chiral diacylhydrazine ligand. The ligand used in the gene switch system may be compounds of Formula I

[chemical structure]

[0609] wherein A is alkoxy, arylalkyloxy or aryloxy; B is optionally substituted aryl or optionally substituted heteroaryl; and R1 and R2 are independently optionally substituted alkyl, arylalkyl, hydroxyalkyl, haloalkyl, optionally substituted cycloalkyl, optionally substituted alkenyl, optionally substituted alkynyl, optionally substituted heterocyclo, optionally substituted aryl or optionally substituted heteroaryl; or pharmaceutically acceptable salts, hydrates, crystalline forms or amorphous forms thereof.

[0610] In another embodiment, the ligand may be enantiomerically enriched compounds of Formula II

[chemical structure]

[0611] wherein A is alkoxy, arylalkyloxy, aryloxy, arylalkyl, optionally substituted aryl or optionally substituted heteroaryl; B is optionally substituted aryl or optionally substituted heteroaryl; and R1 and R2 are independently optionally substituted alkyl, arylalkyl, hydroxyalkyl, haloalkyl, optionally substituted cycloalkyl, optionally substituted alkenyl, optionally substituted alkynyl, optionally substituted heterocyclo, optionally substituted aryl or optionally substituted heteroaryl; with the proviso that R1 does not equal R2; wherein the absolute configuration at the asymmetric carbon atom bearing R1 and R2 is predominantly S; or pharmaceutically acceptable salts, hydrates, crystalline forms or amorphous forms thereof.

[0612] In certain embodiments, the ligand may be enantiomerically enriched compounds of Formula III

[chemical structure]

[0613] wherein A is alkoxy, arylalkyloxy, aryloxy, arylalkyl, optionally substituted aryl or optionally substituted heteroaryl; B is optionally substituted aryl or optionally substituted heteroaryl; and R1 and R2 are independently optionally substituted alkyl, arylalkyl, hydroxyalkyl, haloalkyl, optionally substituted cycloalkyl, optionally substituted alkenyl, optionally substituted alkynyl, optionally substituted heterocyclo, optionally substituted aryl or optionally substituted heteroaryl; with the proviso that R1 does not equal R2; wherein the absolute configuration at the asymmetric carbon atom bearing R1 and R2 is predominantly R; or pharmaceutically acceptable salts, hydrates, crystalline forms or amorphous forms thereof.

[0614] In one embodiment, a ligand may be (R)-3,5-dimethyl-benzoic acid N-(1-tertbutyl-butyl)-N′-(2-ethyl-3-methoxy-benzoyl)-hydrazide having an enantiomeric excess of at least 95% or a pharmaceutically acceptable salt, hydrate, crystalline form or amorphous form thereof.

[0615] The diacylhydrazine ligands of Formula I and chiral diacylhydrazine ligands of Formula II or III, when used with an ecdysone-based gene switch system, provide the means for external temporal regulation of expression of a therapeutic polypeptide or therapeutic polynucleotide of the present invention. See U.S. Pat. Nos. 8,076,517; 8,884,060; and, 9,598,355.

[0616] The ligands used in the present invention may form salts. The term “salt(s)” as used herein denotes acidic and/or basic salts formed with inorganic and/or organic acids and bases. In addition, when a compound of Formula I, II or III contains both a basic moiety and an acidic moiety, zwitterions (“inner salts”) may be formed and are included within the term “salt(s)” as used herein. Pharmaceutically acceptable (i.e., non-toxic, physiologically acceptable) salts are used, although other salts are also useful, e.g., in isolation or purification steps which may be employed during preparation. Salts of the compounds of Formula I, II or III may be formed, for example, by reacting a compound with an amount of acid or base, such as an equivalent amount, in a medium such as one in which the salt precipitates or in an aqueous medium followed by lyophilization.

[0617] The ligands which contain a basic moiety may form salts with a variety of organic and inorganic acids. Exemplary acid addition salts include acetates (such as those formed with acetic acid or trihaloacetic acid, for example, trifluoroacetic acid), adipates, alginates, ascorbates, aspartates, benzoates, benzenesulfonates, bisulfates, borates, butyrates, citrates, camphorates, camphorsulfonates, cyclopentanepropionates, digluconates, dodecylsulfates, ethanesulfonates, fumarates, glucoheptanoates, glycerophosphates, hemisulfates, heptanoates, hexanoates, hydrochlorides (formed with hydrochloric acid), hydrobromides (formed with hydrogen bromide), hydroiodides, 2-hydroxyethanesulfonates, lactates, maleates (formed with maleic acid), methanesulfonates (formed with methanesulfonic acid), 2-naphthalenesulfonates, nicotinates, nitrates, oxalates, pectinates, persulfates, 3-phenylpropionates, phosphates, picrates, pivalates, propionates, salicylates, succinates, sulfates (such as those formed with sulfuric acid), sulfonates (such as those mentioned herein), tartrates, thiocyanates, toluenesulfonates such as tosylates, undecanoates, and the like.

[0618] The ligands which contain an acidic moiety may form salts with a variety of organic and inorganic bases. Exemplary basic salts include ammonium salts, alkali metal salts such as sodium, lithium, and potassium salts, alkaline earth metal salts such as calcium and magnesium salts, salts with organic bases (for example, organic amines) such as benzathines, dicyclohexylamines, hydrabamines (formed with N,N-bis(dehydroabietyl)ethylenediamine), N-methyl-D-glucamines, N-methyl-D-glucamides, t-butyl amines, and salts with amino acids such as arginine, lysine and the like.

[0619] Non-limiting examples of the ligands for the inducible gene expression system also includes those utilizing the FK506 binding domain are FK506, Cyclosporin A, or Rapamycin. FK506, rapamycin, and their analogs are disclosed in U.S. Pat. Nos. 6,649,595; 6,187,757; 7,276,498; and, 7,273,874.

[0620] In some embodiments, a diacylhydrazine ligand for inducible gene expression is administered at unit daily dose of about 5, 10, 15, 20, 25, 30, 35, 40, 50, 60, 70, 80, 90, 100 or 120 mg. In some embodiments, the diacylhydrazine ligand is administered at a unit daily dose of about 5 mg. In some embodiments, the diacylhydrazine ligand is administered at a unit daily dose of about 10 mg. In some embodiments, the diacylhydrazine ligand is administered at a unit daily dose of about 15 mg. In some embodiments, the diacylhydrazine ligand is administered daily at a unit daily dose of about 20 mg.

[0621] In some embodiments, the cytokine, cell tag and/or CAR can be under the control of an inducible promoter for gene transcription. In one aspect, the inducible promoter can be a gene switch ligand inducible promoter. In some cases, an inducible promoter can be a small molecule ligand-inducible two polypeptide ecdysone receptor-based gene switch, such as RHEOSWITCH® gene switch. In some cases, the gene switch system used may be the one described in WO 2018/132494.

[0622] In some embodiments, the cytokines described above can be under the control of an inducible promoter for gene transcription. In one aspect, the inducible promoter can be a gene switch ligand inducible promoter. In some cases, an inducible promoter can be a small molecule ligand-inducible two polypeptide ecdysone receptor-based gene switch, such as RHEOSWITCH® gene switch. In some cases, the gene switch system used may be the one described in WO 2018/132494.

[0623] In some embodiments, the modified immune effector cells as described herein can be under the control of an inducible promoter for gene transcription. In one aspect, the inducible promoter can be a gene switch ligand inducible promoter. In some cases, an inducible promoter can be a small molecule ligand-inducible two polypeptide ecdysone receptor-based gene switch, such as RHEOSWITCH® gene switch as described in WO2018/132494.

### XII. Modified Immune Effector Cells

[0624] Provided herein are modified immune effector cells expressing one or more miRNAs, CARs, cytokines, and/or cell tags as described herein. In some embodiments, modified immune effector cells are modified T cells and/or natural killer (NK) cells. T cells or T lymphocytes are a subtype of white blood cells that are involved in cell-mediated immunity. Exemplary T cells include T helper cells, cytotoxic T cells, TH17 cells, stem memory T cells (TSCM), naïve T cells, memory T cells, effector T cells, regulatory T cells, or natural killer T cells. In certain aspects, the embodiments described herein include making and/or expanding the modified immune effector cells (e.g., T-cells, Tregs, NK-cell or NK T-cells). Such may be accomplished by transfecting the cells with an expression vector containing a DNA (or RNA) construct encoding the one or more miRNAs, CARs, cytokines, and/or cell tags as described herein. It should be understood that the cells of the present disclosure can be human or animal cells.

[0625] T helper cells (TH cells) assist other white blood cells in immunologic processes, including maturation of B cells into plasma cells and memory B cells, and activation of cytotoxic T cells and macrophages. In some instances, TH cells are known as CD4+ T cells due to expression of the CD4 glycoprotein on the cell surfaces. T helper cells become activated when they are presented with peptide antigens by MHC class II molecules, which are expressed on the surface of antigen-presenting cells (APCs). Once activated, they divide rapidly and secrete small proteins called cytokines that regulate or assist in the active immune response. These cells can differentiate into one of several subtypes, including TH1, TH2, TH3, TH17, Th9, or TFH, which secrete different cytokines to facilitate different types of immune responses. Signaling from the APC directs T cells into particular subtypes.

[0626] Cytotoxic T cells (TC cells or CTLs) destroy virus-infected cells and tumor cells, and are also implicated in transplant rejection. These cells are also known as CD8+ T cells since they express the CD8 glycoprotein on their surfaces. These cells recognize their targets by binding to antigen associated with MHC class I molecules, which are present on the surface of all nucleated cells. Through IL-10, adenosine, and other molecules secreted by regulatory T cells, the CD8+ cells can be inactivated to an anergic state, which prevents autoimmune diseases.

[0627] Memory T cells are a subset of antigen-specific T cells that persist long-term after an infection has resolved. They quickly expand to large numbers of effector T cells upon re-exposure to their cognate antigen, thus providing the immune system with “memory” against past infections. Memory T cells comprise subtypes: stem memory T cells (TSCM), central memory T cells (TCM cells) and two types of effector memory T cells (TEM cells and TEMRA cells). Memory cells can be either CD4+ or CD8+. Memory T cells can express the cell surface proteins CD45RO, CD45RA and/or CCR7.

[0628] Regulatory T cells (Treg cells), formerly known as suppressor T cells, play a role in the maintenance of immunological tolerance. Their major role is to shut down T cell-mediated immunity toward the end of an immune reaction and to suppress autoreactive T cells that escaped the process of negative selection in the thymus.

[0629] Natural killer T cells (NKT cells) bridge the adaptive immune system with the innate immune system. Unlike conventional T cells that recognize peptide antigens presented by major histocompatibility complex (MHC) molecules, NKT cells recognize glycolipid antigen presented by a molecule called CD1d. Once activated, these cells can perform functions ascribed to both Th and Tc cells (i.e., cytokine production and release of cytolytic/cell killing molecules). They are also able to recognize and eliminate some tumor cells and cells infected with herpes viruses.

[0630] Natural killer (NK) cells are a type of cytotoxic lymphocyte of the innate immune system. In some instances, NK cells provide a first line defense against viral infections and/or tumor formation. NK cells can detect MHC presented on infected or cancerous cells, triggering cytokine release, and subsequently induce lysis and apoptosis. NK cells can further detect stressed cells in the absence of antibodies and/or MHC, thereby allowing a rapid immune response.

[0631] A. Immune Effector Cell Sources

[0632] In certain aspects, the embodiments described herein include methods of making and/or expanding the modified (antigen-specific redirected) immune effector cells (e.g., T-cells, Tregs, NK-cell or NK T-cells) that comprise transfecting the cells with an expression vector containing a DNA (or RNA) construct encoding the CAR, then, optionally, stimulating the cells with feeder cells, recombinant antigen, or an antibody to the receptor to cause the cells to proliferate. In certain aspects, the cell (or cell population) engineered to express a CAR is a stem cell, CD34+ cord blood cells, iPS cell, T cell differentiated from iPS cell, immune effector cell or a precursor of these cells.

[0633] Sources of immune effector cells can include both allogeneic and autologous sources. In some cases immune effector cells can be differentiated from stem cells or induced pluripotent stem cells (iPSCs). Thus, cells for engineering according to the embodiments can be isolated from umbilical cord blood, peripheral blood, human embryonic stem cells, or iPSCs. For example, allogeneic T cells can be modified to include a chimeric antigen receptor (and optionally, to lack functional TCR). In some aspects, the immune effector cells are primary human T cells such as T cells derived from human peripheral blood mononuclear cells (PBMC). PBMCs can be collected from the peripheral blood or after stimulation with G-CSF (Granulocyte colony stimulating factor) from the bone marrow, or umbilical cord blood. In one aspect, the immune effector cells are Pan T cells. Following transfection or transduction (e.g., with a CAR expression construct), the cells can be immediately infused or can be cryo-preserved. In certain aspects, following transfection or transduction, the cells can be preserved in a cytokine bath that can include IL-2 and/or IL-21 until ready for infusion. In certain aspects, following transfection, the cells can be propagated for days, weeks, or months ex vivo as a bulk population within about 1, 2, 3, 4, 5 days or more following gene transfer into cells. In a further aspect, following transfection, the transfectants are cloned and a clone demonstrating presence of a single integrated or episomally maintained expression cassette or plasmid, and expression of the chimeric antigen receptor is expanded ex vivo. The clone selected for expansion demonstrates the capacity to specifically recognize and lyse antigen-expressing target cells. The recombinant T cells can be expanded by stimulation with IL-2, or other cytokines that bind the common gamma-chain (e.g., IL-7, IL-12, IL-15, IL-21, and others). The recombinant T cells can be expanded by stimulation with artificial antigen presenting cells. The recombinant T cells can be expanded on artificial antigen presenting cell or with an antibody, such as OKT3, which cross links CD3 on the T cell surface. Subsets of the recombinant T cells can be further selected with the use of magnetic bead based isolation methods and/or fluorescence activated cell sorting technology and further cultured with the AaPCs. In a further aspect, the genetically modified cells can be cryopreserved. In some embodiments, the genetically modified cells are not cryopreserved.

[0634] T cells can also be obtained from a number of sources, including bone marrow, lymph node tissue, cord blood, thymus tissue, tissue from a site of infection, ascites, pleural effusion, spleen tissue, and tumors. In certain embodiments of the present invention, any number of T cell lines available in the art, can be used. In certain embodiments of the present invention, T cells can be obtained from a unit of blood collected from a subject using any number of techniques known to the skilled artisan, such as Ficoll® separation. In some embodiments, cells from the circulating blood of an individual are obtained by apheresis. The apheresis product typically contains lymphocytes, including T cells, monocytes, granulocytes, B cells, other nucleated white blood cells, red blood cells, and platelets. In one embodiment, the cells collected by apheresis can be washed to remove the plasma fraction and to place the cells in an appropriate buffer or media for subsequent processing steps. In one embodiment of the invention, the cells are washed with phosphate buffered saline (PBS). In an alternative embodiment, the wash solution lacks calcium and can lack magnesium or can lack many if not all divalent cations. Initial activation steps in the absence of calcium lead to magnified activation. As those of ordinary skill in the art would readily appreciate a washing step can be accomplished by methods known to those in the art, such as by using a semi-automated “flow-through” centrifuge (for example, the Cobe 2991 cell processor, the Baxter CytoMate, or the Haemonetics Cell Saver 5) according to the manufacturer+s instructions. After washing, the cells can be resuspended in a variety of biocompatible buffers, such as, for example, Ca²⁺-free, Mg²⁺-free PBS, PlasmaLyte A, or other saline solution with or without buffer. Alternatively, the undesirable components of the apheresis sample can be removed and the cells directly resuspended in culture media.

[0635] In another embodiment, T cells are isolated from peripheral blood lymphocytes by lysing the red blood cells and depleting the monocytes, for example, by centrifugation through a PERCOLL® gradient or by counterflow centrifugal elutriation. A specific subpopulation of T cells, such as CD³⁺, CD²⁸⁺, CD⁴⁺, CD⁸⁺, CD45RA⁺, and CD45RO⁺ T cells, can be further isolated by positive or negative selection techniques. In another embodiment, CD14+ cells are depleted from the T-cell population. For example, in one embodiment, T cells are isolated by incubation with anti-CD3/anti-CD28 (i.e., 3×28)-conjugated beads, such as DYNABEADS® M-450 CD3/CD28 T, for a time period sufficient for positive selection of the desired T cells. In one embodiment, the time period is about 30 minutes. In a further embodiment, the time period ranges from 30 minutes to 36 hours or longer and all integer values there between. In a further embodiment, the time period is at least 1, 2, 3, 4, 5, or 6 hours. In yet another embodiment, the time period is 10 to 24 hours. In one embodiment, the incubation time period is 24 hours. For isolation of T cells from patients with leukemia, use of longer incubation times, such as 24 hours, can increase cell yield. Longer incubation times can be used to isolate T cells in any situation where there are few T cells as compared to other cell types, such in isolating tumor infiltrating lymphocytes (TIL) from tumor tissue or from immune-compromised individuals. Further, use of longer incubation times can increase the efficiency of capture of CD8+ T cells. Thus, by simply shortening or lengthening the time T cells are allowed to bind to the CD3/CD28 beads and/or by increasing or decreasing the ratio of beads to T cells (as described further herein), subpopulations of T cells can be preferentially selected for or against at culture initiation or at other time points during the process. Additionally, by increasing or decreasing the ratio of anti-CD3 and/or anti-CD28 antibodies on the beads or other surface, subpopulations of T cells can be preferentially selected for or against at culture initiation or at other desired time points. The skilled artisan would recognize that multiple rounds of selection can also be used in the context of this invention. In certain embodiments, it can be desirable to perform the selection procedure and use the “unselected” cells in the activation and expansion process. “Unselected” cells can also be subjected to further rounds of selection.

[0636] Enrichment of a T cell population by negative selection can be accomplished with a combination of antibodies directed to surface markers unique to the negatively selected cells. One method is cell sorting and/or selection via negative magnetic immunoadherence or flow cytometry that uses a cocktail of monoclonal antibodies directed to cell surface markers present on the cells negatively selected. For example, to enrich for CD4+ cells by negative selection, a monoclonal antibody cocktail typically includes antibodies to CD14, CD20, CD11b, CD16, HLA-DR, and CD8. In certain embodiments, it can be desirable to enrich for or positively select for regulatory T cells which typically express CD4⁺, CD25⁺, CD62L^{hi}, GITR⁺, and FoxP3⁺. Alternatively, in certain embodiments, T regulatory cells are depleted by anti-CD25 conjugated beads or other similar method of selection.

[0637] For isolation of a desired population of cells by positive or negative selection, the concentration of cells and surface (e.g., particles such as beads) can be varied. In certain embodiments, it can be desirable to significantly decrease the volume in which beads and cells are mixed together (i.e., increase the concentration of cells), to ensure maximum contact of cells and beads. For example, in one embodiment, a concentration of 2 billion cells/ml is used. In one embodiment, a concentration of 1 billion cells/ml is used. In a further embodiment, greater than 100 million cells/ml is used. In a further embodiment, a concentration of cells of 10, 15, 20, 25, 30, 35, 40, 45, or 50 million cells/ml is used. In yet another embodiment, a concentration of cells from 75, 80, 85, 90, 95, or 100 million cells/ml is used. In further embodiments, concentrations of 125 or 150 million cells/ml can be used. Using high concentrations can result in increased cell yield, cell activation, and cell expansion. Further, use of high cell concentrations allows more efficient capture of cells that can weakly express target antigens of interest, such as CD28-negative T cells, or from samples where there are many tumor cells present (i.e., leukemic blood, tumor tissue, etc.). Such populations of cells can have therapeutic value and would be desirable to obtain. For example, using high concentration of cells allows more efficient selection of CD8+ T cells that normally have weaker CD28 expression.

[0638] In a related embodiment, it can be desirable to use lower concentrations of cells. By significantly diluting the mixture of T cells and surface (e.g., particles such as beads), interactions between the particles and cells is minimized. This selects for cells that express high amounts of desired antigens to be bound to the particles. For example, CD4+ T cells express higher levels of CD28 and are more efficiently captured than CD8+ T cells in dilute concentrations. In one embodiment, the concentration of cells used is 5×10⁶/ml. In other embodiments, the concentration used can be from about 1×10⁵/ml to 1×10⁶/ml, and any integer value in between.

[0639] In other embodiments, the cells can be incubated on a rotator for varying lengths of time at varying speeds at either 2-10° C. or at room temperature.

[0640] T cells for stimulation can also be frozen after a washing step. After the washing step that removes plasma and platelets, the cells can be suspended in a freezing solution. While many freezing solutions and parameters are known in the art and will be useful in this context, one method involves using PBS containing 20% DMSO and 8% human serum albumin, or culture media containing 10% Dextran 40 and 5% Dextrose, 20% Human Serum Albumin and 7.5% DMSO, or 31.25% Plasmalyte-A, 31.25% Dextrose 5%, 0.45% NaCl, 10% Dextran 40 and 5% Dextrose, 20% Human Serum Albumin, and 7.5% DMSO or other suitable cell freezing media containing for example, Hespan and PlasmaLyte A, the cells then are frozen to −80° C. at a rate of 1° C. per minute and stored in the vapor phase of a liquid nitrogen storage tank. Other methods of controlled freezing can be used as well as uncontrolled freezing immediately at −20° C. or in liquid nitrogen. In certain embodiments, cryopreserved cells are thawed and washed as described herein and allowed to rest for one hour at room temperature prior to activation using the methods of the present invention.

[0641] Also provided in certain embodiments is the collection of blood samples or apheresis product from a subject at a time period prior to when the expanded cells as described herein might be needed. As such, the source of the cells to be expanded can be collected at any time point necessary, and desired cells, such as T cells, isolated and frozen for later use in T cell therapy for any number of diseases or conditions that would benefit from T cell therapy, such as those described herein. In one embodiment a blood sample or an apheresis is taken from a generally healthy subject. In certain embodiments, a blood sample or an apheresis is taken from a generally healthy subject who is at risk of developing a disease, but who has not yet developed a disease, and the cells of interest are isolated and frozen for later use. In certain embodiments, the T cells can be expanded, frozen, and used at a later time. In certain embodiments, samples are collected from a patient shortly after diagnosis of a particular disease as described herein but prior to any treatments. In a further embodiment, the cells are isolated from a blood sample or an apheresis from a subject prior to any number of relevant treatment modalities, including but not limited to treatment with agents such as natalizumab, efalizumab, antiviral agents, chemotherapy, radiation, immunosuppressive agents, such as cyclosporin, azathioprine, methotrexate, mycophenolate, and FK506, antibodies, or other immunoablative agents such as CAMPATH, anti-CD3 antibodies, cytoxan, fludarabine, cyclosporin, FK506, rapamycin, mycophenolic acid, steroids, FR901228, and irradiation. These drugs inhibit either the calcium dependent phosphatase calcineurin (cyclosporine and FK506) or inhibit the p70S6 kinase that is important for growth factor induced signaling (rapamycin) (Liu et al., Cell 66:807-815, (1991); Henderson et al., Immun 73:316-321, (1991); Bierer et al., Curr. Opin. Immun 5:763-773, (1993)). In a further embodiment, the cells are isolated for a patient and frozen for later use in conjunction with (e.g., before, simultaneously or following) bone marrow or stem cell transplantation, T cell ablative therapy using either chemotherapy agents such as, fludarabine, external-beam radiation therapy (XRT), cyclophosphamide, or antibodies such as OKT3 or CAMPATH. In another embodiment, the cells are isolated prior to and can be frozen for later use for treatment following B-cell ablative therapy such as agents that react with CD20, e.g., Rituxan.

[0642] In a further embodiment of the present invention, T cells are obtained from a patient directly following treatment. In this regard, it has been observed that following certain cancer treatments, in particular treatments with drugs that damage the immune system, shortly after treatment during the period when patients would normally be recovering from the treatment, the quality of T cells obtained can be optimal or improved for their ability to expand ex vivo. Likewise, following ex vivo manipulation using the methods described herein, these cells can be in a preferred state for enhanced engraftment and in vivo expansion. Thus, it is contemplated within the context of the present invention to collect blood cells, including T cells, dendritic cells, or other cells of the hematopoietic lineage, during this recovery phase. Further, in certain embodiments, mobilization (for example, mobilization with GM-CSF) and conditioning regimens can be used to create a condition in a subject wherein repopulation, recirculation, regeneration, and/or expansion of particular cell types is favored, especially during a defined window of time following therapy. Illustrative cell types include T cells, B cells, dendritic cells, and other cells of the immune system.

[0643] B. Activation and Expansion of Immune Effector Cells

[0644] Whether prior to or after engineering of the immune effector cells to express a CAR described herein, the cells can be activated and expanded generally using methods as described, for example, in U.S. Pat. Nos. 6,352,694; 6,534,055; 6,905,680; 6,692,964; 5,858,358; 6,887,466; 6,905,681; 7,144,575; 7,067,318; 7,172,869; 7,232,566; 7,175,843; 5,883,223; 6,905,874; 6,797,514; 6,867,041; and U.S. Patent Application Publication No. 20060121005.

[0645] Generally, the immune effector cells described herein are expanded by contact with a surface having attached thereto an agent that stimulates a CD3/TCR complex associated signal and a ligand that stimulates a co-stimulatory molecule on the surface of the cells. In particular, cell populations can be stimulated as described herein, such as by contact with an anti-CD3 antibody, or antigen-binding fragment thereof, or an anti-CD2 antibody immobilized on a surface, or by contact with a protein kinase C activator (e.g., bryostatin) in conjunction with a calcium ionophore. For co-stimulation of an accessory molecule on the surface of the cells, a ligand that binds the accessory molecule is used. For example, a population of T cells can be contacted with an anti-CD3 antibody and an anti-CD28 antibody, under conditions appropriate for stimulating proliferation of the T cells. To stimulate proliferation of either CD4+ T cells or CD8+ T cells, an anti-CD3 antibody and an anti-CD28 antibody. Examples of an anti-CD28 antibody include 9.3, B-T3, XR-CD28 (Diaclone, Besancon, France) can be used as can other methods commonly known in the art (Berg et al., Transplant Proc. 30(8):3975-3977, (1998); Haanen et al., J. Exp. Med. 190(9):13191328, (1999); Garland et al., J. Immunol Meth. 227(1-2):53-63, (1999)).

[0646] In certain embodiments, the primary stimulatory signal and the co-stimulatory signal for the immune effector cell can be provided by different protocols. For example, the agents providing each signal can be in solution or coupled to a surface. When coupled to a surface, the agents can be coupled to the same surface (i.e., in “cis” formation) or to separate surfaces (i.e., in “trans” formation). Alternatively, one agent can be coupled to a surface and the other agent in solution. In one embodiment, the agent providing the co-stimulatory signal is bound to a cell surface and the agent providing the primary activation signal is in solution or coupled to a surface. In certain embodiments, both agents can be in solution. In another embodiment, the agents can be in soluble form, and then cross-linked to a surface, such as a cell expressing Fc receptors or an antibody or other binding agent which will bind to the agents. In this regard, see for example, U.S. Patent Application Publication Nos. 20040101519 and 20060034810 for artificial antigen presenting cells (aAPCs) that are contemplated for use in activating and expanding T cells in the present invention.

[0647] In one embodiment, the two agents are immobilized on beads, either on the same bead, i.e., “cis,” or to separate beads, i.e., “trans.” By way of example, the agent providing the primary activation signal is an anti-CD3 antibody or an antigen-binding fragment thereof and the agent providing the co-stimulatory signal is an anti-CD28 antibody or antigen-binding fragment thereof; and both agents are co-immobilized to the same bead in equivalent molecular amounts. In one embodiment, a 1:1 ratio of each antibody bound to the beads for CD4⁺ T cell expansion and T cell growth is used. In certain aspects of the present invention, a ratio of anti CD3:CD28 antibodies bound to the beads is used such that an increase in T cell expansion is observed as compared to the expansion observed using a ratio of 1:1. In one particular embodiment an increase of from about 1 to about 3 fold is observed as compared to the expansion observed using a ratio of 1:1. In one embodiment, the ratio of CD3:CD28 antibody bound to the beads ranges from 100:1 to 1:100 and all integer values there between. In one aspect of the present invention, more anti-CD28 antibody is bound to the particles than anti-CD3 antibody, i.e., the ratio of CD3:CD28 is less than one. In certain embodiments of the invention, the ratio of anti CD28 antibody to anti CD3 antibody bound to the beads is greater than 2:1. In one particular embodiment, a 1:100 CD3:CD28 ratio of antibody bound to beads is used. In another embodiment, a 1:75 CD3:CD28 ratio of antibody bound to beads is used. In a further embodiment, a 1:50 CD3:CD28 ratio of antibody bound to beads is used. In another embodiment, a 1:30 CD3:CD28 ratio of antibody bound to beads is used. In some embodiments, a 1:10 CD3:CD28 ratio of antibody bound to beads is used. In another embodiment, a 1:3 CD3:CD28 ratio of antibody bound to the beads is used. In yet another embodiment, a 3:1 CD3:CD28 ratio of antibody bound to the beads is used.

[0648] Ratios of particles to cells from 1:500 to 500:1 and any integer values in between can be used to stimulate T cells or other target cells. As those of ordinary skill in the art can readily appreciate, the ratio of particles to cells can depend on particle size relative to the target cell. For example, small sized beads could only bind a few cells, while larger beads could bind many. In certain embodiments the ratio of cells to particles ranges from 1:100 to 100:1 and any integer values in-between and in further embodiments the ratio comprises 1:9 to 9:1 and any integer values in between, can also be used to stimulate T cells. The ratio of anti-CD3- and anti-CD28-coupled particles to T cells that result in T cell stimulation can vary as noted above, however certain values include 1:100, 1:50, 1:40, 1:30, 1:20, 1:10, 1:9, 1:8, 1:7, 1:6, 1:5, 1:4, 1:3, 1:2, 1:1, 2:1, 3:1, 4:1, 5:1, 6:1, 7:1, 8:1, 9:1, 10:1, and 15:1 with one ratio being at least 1:1 particles per T cell. In one embodiment, a ratio of particles to cells of 1:1 or less is used. In one particular embodiment, the particle:cell ratio is 1:5. In further embodiments, the ratio of particles to cells can be varied depending on the day of stimulation. For example, in one embodiment, the ratio of particles to cells is from 1:1 to 10:1 on the first day and additional particles are added to the cells every day or every other day thereafter for up to 10 days, at final ratios of from 1:1 to 1:10 (based on cell counts on the day of addition). In one particular embodiment, the ratio of particles to cells is 1:1 on the first day of stimulation and adjusted to 1:5 on the third and fifth days of stimulation. In another embodiment, particles are added on a daily or every other day basis to a final ratio of 1:1 on the first day, and 1:5 on the third and fifth days of stimulation. In another embodiment, the ratio of particles to cells is 2:1 on the first day of stimulation and adjusted to 1:10 on the third and fifth days of stimulation. In another embodiment, particles are added on a daily or every other day basis to a final ratio of 1:1 on the first day, and 1:10 on the third and fifth days of stimulation. One of skill in the art will appreciate that a variety of other ratios can be suitable for use in the present invention. In particular, ratios will vary depending on particle size and on cell size and type.

[0649] In further embodiments described herein, the immune effector cells, such as T cells, are combined with agent-coated beads, the beads and the cells are subsequently separated, and then the cells are cultured. In an alternative embodiment, prior to culture, the agent-coated beads and cells are not separated but are cultured together. In a further embodiment, the beads and cells are first concentrated by application of a force, such as a magnetic force, resulting in increased ligation of cell surface markers, thereby inducing cell stimulation.

[0650] By way of example, cell surface proteins can be ligated by allowing paramagnetic beads to which anti-CD3 and anti-CD28 are attached (3×28 beads) to contact the T cells. In one embodiment the cells (for example, 10⁴ to 10⁹ T cells) and beads (for example, DYNABEADS® M-450 CD3/CD28 T paramagnetic beads at a ratio of 1:1, or MACS® MicroBeads from Miltenyi Biotec) are combined in a buffer, for example, PBS (without divalent cations such as, calcium and magnesium). Again, those of ordinary skill in the art can readily appreciate any cell concentration can be used. For example, the target cell can be very rare in the sample and comprise only 0.01% of the sample or the entire sample (i.e., 100%) can comprise the target cell of interest. Accordingly, any cell number is within the context of the present invention. In certain embodiments, it can be desirable to significantly decrease the volume in which particles and cells are mixed together (i.e., increase the concentration of cells), to ensure maximum contact of cells and particles. For example, in one embodiment, a concentration of about 2 billion cells/ml is used. In another embodiment, greater than 100 million cells/ml is used. In a further embodiment, a concentration of cells of 10, 15, 20, 25, 30, 35, 40, 45, or 50 million cells/ml is used. In yet another embodiment, a concentration of cells from 75, 80, 85, 90, 95, or 100 million cells/ml is used. In further embodiments, concentrations of 125 or 150 million cells/ml can be used. Using high concentrations can result in increased cell yield, cell activation, and cell expansion. Further, use of high cell concentrations allows more efficient capture of cells that can weakly express target antigens of interest, such as CD28-negative T cells. Such populations of cells can have therapeutic value and would be desirable to obtain in certain embodiments. For example, using high concentration of cells allows more efficient selection of CD8+ T cells that normally have weaker CD28 expression.

[0651] In one embodiment described herein, the mixture can be cultured for several hours (about 3 hours) to about 14 days or any hourly integer value in between. In another embodiment, the mixture can be cultured for 21 days. In one embodiment of the invention the beads and the T cells are cultured together for about eight days. In another embodiment, the beads and T cells are cultured together for 2-3 days. Several cycles of stimulation may also be desired such that culture time of T cells can be 60 days or more. Conditions appropriate for T cell culture include an appropriate media (e.g., Minimal Essential Media or RPMI Media 1640 or, X-vivo 15, (Lonza)) that can contain factors necessary for proliferation and viability, including serum (e.g., fetal bovine or human serum), interleukin-2 (IL-2), insulin, IFN-.gamma., IL-4, IL-7, GM-CSF, IL-10, IL-12, IL-15, TGFbeta, and TNF-alpha or any other additives for the growth of cells known to the skilled artisan. Other additives for the growth of cells include, but are not limited to, surfactant, plasmanate, and reducing agents such as N-acetyl-cysteine and 2-mercaptoethanol. Media can include RPMI 1640, AIM-V, DMEM, MEM, alpha-MEM, F-12, X-Vivo 15, and X-Vivo 20, Optimizer, with added amino acids, sodium pyruvate, and vitamins, either serum-free or supplemented with an appropriate amount of serum (or plasma) or a defined set of hormones, and/or an amount of cytokine(s) sufficient for the growth and expansion of T cells. Antibiotics, e.g., penicillin and streptomycin, are included only in experimental cultures, not in cultures of cells that are to be infused into a subject. The target cells are maintained under conditions necessary to support growth, for example, an appropriate temperature (e.g., 37° C.) and atmosphere (e.g., air plus 5% CO₂).

[0652] Ex vivo procedures are well known and are discussed more fully below. Briefly, cells are isolated from a mammal (for example, a human) and genetically modified (i.e., transduced or transfected in vitro) with a vector expressing a CAR disclosed herein. The CAR-modified cell can be administered to a mammalian recipient to provide a therapeutic benefit. The mammalian recipient can be a human and the CAR-modified cell can be autologous with respect to the recipient. Alternatively, the cells can be allogeneic, syngeneic or xenogeneic with respect to the recipient.

[0653] The procedure for ex vivo expansion of hematopoietic stem and progenitor cells is described in U.S. Pat. No. 5,199,942, can be applied to the cells of the present invention. Other suitable methods are known in the art, therefore the present invention is not limited to any particular method of ex vivo expansion of the cells. Briefly, ex vivo culture and expansion of effector cells comprises: (1) collecting CD34+ hematopoietic stem and progenitor cells from a mammal from peripheral blood harvest or bone marrow explants; and (2) expanding such cells ex vivo. In addition to the cellular growth factors described in U.S. Pat. No. 5,199,942, other factors such as flt3-L, IL-1, IL-3 and c-kit ligand, can be used for culturing and expansion of the cells.

[0654] Effector cells that have been exposed to varied stimulation times can exhibit different characteristics. For example, typical blood or apheresed peripheral blood mononuclear cell products have a helper T cell population (T_{H}, CD4±) that is greater than the cytotoxic or suppressor T cell population (Tc, CD8±). Ex vivo expansion of T cells by stimulating CD3 and CD28 receptors produces a population of T cells that prior to about days 8-9 consists predominately of T_{H} cells, while after about days 8-9, the population of T cells comprises an increasingly greater population of Tc cells. Accordingly, depending on the purpose of treatment, infusing a subject with a T cell population comprising predominately of T_{H} cells can be advantageous. Similarly, if an antigen-specific subset of Tc cells has been isolated it can be beneficial to expand this subset to a greater degree.

[0655] Further, in addition to CD4 and CD8 markers, other phenotypic markers vary significantly, but in large part, reproducibly during the course of the cell expansion process. Thus, such reproducibility enables the ability to tailor an activated T cell product for specific purposes.

[0656] In some cases, immune effector cells of the embodiments (e.g., T-cells) are co-cultured with activating and propagating cells (AaPCs), to aid in cell expansion. AaPCs can also be referred to as artificial Antigen Presenting cells (aAPCs). For example, antigen presenting cells (APCs) are useful in preparing therapeutic compositions and cell therapy products of the embodiments. In one aspect, the AaPCs can be genetically modified K562 cells. For general guidance regarding the preparation and use of antigen-presenting systems, see, e.g., U.S. Pat. Nos. 6,225,042, 6,355,479, 6,362,001 and 6,790,662; U.S. Patent Application Publication Nos. 2009/0017000 and 2009/0004142; and International Publication No. WO2007/103009. In yet a further aspect of the embodiments, culturing the genetically modified CAR cells comprises culturing the genetically modified CAR cells in the presence of dendritic cells or activating and propagating cells (AaPCs) that stimulate expansion of the CAR-expressing immune effector cells. In still further aspects, the AaPCs comprise a CAR-binding antibody or fragment thereof expressed on the surface of the AaPCs. The AaPCs can comprise additional molecules that activate or co-stimulate T-cells in some cases. The additional molecules can, in some cases, comprise membrane-bound Cy cytokines. In yet still further aspects, the AaPCs are inactivated or irradiated, or have been tested for and confirmed to be free of infectious material. In still further aspects, culturing the genetically modified CAR cells in the presence of AaPCs comprises culturing the genetically modified CAR cells in a medium comprising soluble cytokines, such as IL-15, IL-21 and/or IL-2. The cells can be cultured at a ratio of about 10:1 to about 1:10; about 3:1 to about 1:5; about 1:1 to about 1:3 (immune effector cells to AaPCs); or any range derivable therein. For example, the co-culture of T cells and AaPCs can be at a ratio of about 1:1, about 1:2 or about 1:3.

[0657] In one aspect, the AaPCs can express CD137L. In some aspects, the AaPCs can further express the antigen that is targeted by the CAR cell, for example MUC16, CD33, or ROR1 (full length, truncate or any variant thereof). In other aspects, the AaPCs can further express CD64, CD86, or mIL15. In certain aspects, the AaPCs can express at least one anti-CD3 antibody clone, such as, for example, OKT3 and/or UCHT1. In one aspect, the AaPCs can be inactivated (e.g., irradiated). In one aspect, the AaPCs have been tested and confirmed to be free of infectious material. Methods for producing such AaPCs are known in the art. In one aspect, culturing the CAR-modified T cell population with AaPCs can comprise culturing the cells at a ratio of about 10:1 to about 1:10; about 3:1 to about 1:5; about 1:1 to about 1:3 (T cells to AaPCs); or any range derivable therein. For example, the co-culture of T cells and AaPCs can be at a ratio of about 1:1, about 1:2 or about 1:3. In one aspect, the culturing step can further comprise culturing with an aminobisphosphonate (e.g., zoledronic acid).

[0658] In one aspect, the population of genetically modified CAR cells is immediately infused into a subject or cryopreserved. In another aspect, the population of genetically modified CAR cells is placed in a cytokine bath prior to infusion into a subject. In a further aspect, the population of genetically modified CAR cells is cultured and/or stimulated for no more than 1, 2, 3, 4, 5, 6, 7, 14, 21, 28, 35 42 days, 49, 56, 63 or 70 days. In some embodiments, the population of CAR-T cells is cultured and/or stimulated for at least 0, 2, 4, 6, 8, 10, 12, 14, 16, 18, 20, 22, 24, 26, 28, 30 or more days. In some embodiments, the population of CAR-T cells is cultured and/or stimulated for at least 5, 10, 15, 20, 25, 30, 35, 40, 45, 50, 55, 60 or more days. In some embodiments, the population of CAR expressing effector cells is cultured and/or stimulated for at least 7, 14, 21, 28, 35, 42, 49, 56, 63 or more days. In an embodiment, a stimulation includes the co-culture of the genetically modified CAR-T cells with AaPCs to promote the growth of CAR positive T cells. In another aspect, the population of genetically modified CAR cells is stimulated for not more than: 1× stimulation, 2× stimulation, 3× stimulation, 4× stimulation, 5× stimulation, 5× stimulation, 6× stimulation, 7× stimulation, 8× stimulation, 9× stimulation or 10× stimulation. In some instances, the genetically modified cells are not cultured ex vivo in the presence of AaPCs. In some specific instances, the method of the embodiment further comprises enriching the cell population for CAR-expressing immune effector cells (e.g., T-cells) after the transfection and/or culturing step. The enriching can comprise fluorescence-activated cell sorting (FACS) to sort for CAR-expressing cells. In a further aspect, the sorting for CAR-expressing cells comprises use of a CAR-binding antibody. The enriching can also comprise depletion of CD56+ cells. In yet still a further aspect of the embodiment, the method further comprises cryopreserving a sample of the population of genetically modified CAR cells.

[0659] In some cases, AaPCs are incubated with a peptide of an optimal length that allows for direct binding of the peptide to the MHC molecule without additional processing. Alternatively, the cells can express an antigen of interest (i.e., in the case of MHC-independent antigen recognition). Furthermore, in some cases, APCs can express an antibody that binds to either a specific CAR polypeptide or to CAR polypeptides in general (e.g., a universal activating and propagating cell (uAPC). Such methods are disclosed in WO2014/190273. In addition to peptide-MHC molecules or antigens of interest, the AaPC systems can also comprise at least one exogenous assisting molecule. Any suitable number and combination of assisting molecules can be employed. The assisting molecule can be selected from assisting molecules such as co-stimulatory molecules and adhesion molecules. Exemplary co-stimulatory molecules include CD70 and B7.1 (B7.1 was previously known as B7 and also known as CD80), which among other things, bind to CD28 and/or CTLA-4 molecules on the surface of T cells, thereby affecting, for example, T-cell expansion, Th1 differentiation, short-term T-cell survival, and cytokine secretion such as interleukin (IL)-2. Adhesion molecules can include carbohydrate-binding glycoproteins such as selectins, transmembrane binding glycoproteins such as integrins, calcium-dependent proteins such as cadherins, and single-pass transmembrane immunoglobulin (Ig) superfamily proteins, such as intercellular adhesion molecules (ICAMs) that promote, for example, cell-to-cell or cell-to-matrix contact. Exemplary adhesion molecules include LFA-3 and ICAMs, such as ICAM-1. Techniques, methods, and reagents useful for selection, cloning, preparation, and expression of exemplary assisting molecules, including co-stimulatory molecules and adhesion molecules, are exemplified in, e.g., U.S. Pat. Nos. 6,225,042, 6,355,479, and 6,362,001.

[0660] Cells selected to become AaPCs, preferably have deficiencies in intracellular antigen-processing, intracellular peptide trafficking, and/or intracellular MHC Class I or Class II molecule-peptide loading, or are poikilothermic (i.e., less sensitive to temperature challenge than mammalian cell lines), or possess both deficiencies and poikilothermic properties. Preferably, cells selected to become AaPCs also lack the ability to express at least one endogenous counterpart (e.g., endogenous MHC Class I or Class II molecule and/or endogenous assisting molecules as described above) to the exogenous MHC Class I or Class II molecule and assisting molecule components that are introduced into the cells. Furthermore, AaPCs preferably retain the deficiencies and poikilothermic properties that were possessed by the cells prior to their modification to generate the AaPCs. Exemplary AaPCs either constitute or are derived from a transporter associated with antigen processing (TAP)-deficient cell line, such as an insect cell line. An exemplary poikilothermic insect cells line is a Drosophila cell line, such as a Schneider 2 cell line (see, e.g., Schneider 1972 Illustrative methods for the preparation, growth, and culture of Schneider 2 cells, are provided in U.S. Pat. Nos. 6,225,042, 6,355,479, and 6,362,001.

[0661] In one embodiment, AaPCs are also subjected to a freeze-thaw cycle. In an exemplary freeze-thaw cycle, the AaPCs can be frozen by contacting a suitable receptacle containing the AaPCs with an appropriate amount of liquid nitrogen, solid carbon dioxide (i.e., dry ice), or similar low-temperature material, such that freezing occurs rapidly. The frozen APCs are then thawed, either by removal of the AaPCs from the low-temperature material and exposure to ambient room temperature conditions, or by a facilitated thawing process in which a lukewarm water bath or warm hand is employed to facilitate a shorter thawing time. Additionally, AaPCs can be frozen and stored for an extended period of time prior to thawing. Frozen AaPCs can also be thawed and then lyophilized before further use. Preferably, preservatives that might detrimentally impact the freeze-thaw procedures, such as dimethyl sulfoxide (DMSO), polyethylene glycols (PEGs), and other preservatives, are absent from media containing AaPCs that undergo the freeze-thaw cycle, or are essentially removed, such as by transfer of AaPCs to media that is essentially devoid of such preservatives.

[0662] In further embodiments, xenogenic nucleic acid and nucleic acid endogenous to the AaPCs, can be inactivated by crosslinking, so that essentially no cell growth, replication or expression of nucleic acid occurs after the inactivation. In one embodiment, AaPCs are inactivated at a point subsequent to the expression of exogenous MHC and assisting molecules, presentation of such molecules on the surface of the AaPCs, and loading of presented MHC molecules with selected peptide or peptides. Accordingly, such inactivated and selected peptide loaded AaPCs, while rendered essentially incapable of proliferating or replicating, retain selected peptide presentation function. Preferably, the crosslinking also yields AaPCs that are essentially free of contaminating microorganisms, such as bacteria and viruses, without substantially decreasing the antigen-presenting cell function of the AaPCs. Thus crosslinking maintains the important AaPC functions of while helping to alleviate concerns about safety of a cell therapy product developed using the AaPCs. For methods related to crosslinking and AaPCs, see for example, U.S. Patent Application Publication No. 20090017000.

[0663] In certain embodiments there are further provided an engineered antigen presenting cell (APC). Such cells can be used, for example, as described above, to propagate immune effector cells ex vivo. In further aspects, engineered APCs can, themselves be administered to a patient and thereby stimulate expansion of immune effector cells in vivo. Engineered APCs of the embodiments can, themselves, be used as a therapeutic agent. In other embodiments, the engineered APCs can used as a therapeutic agent that can stimulate activation of endogenous immune effector cells specific for a target antigen and/or to increase the activity or persistence of adoptively transferred immune effector cells specific to a target antigen.

[0664] As used herein the term “engineered APC” refers to cell(s) that comprises at least a first transgene, wherein the first transgene encodes a HLA. Such engineered APCs can further comprise a second transgene for expression of an antigen, such that the antigen is presented at the surface on the APC in complex with the HLA. In some aspects, the engineered APC can be a cell type that presented antigens (e.g., a dendritic cell). In further aspects, engineered APC can be produced from a cell type that does not normally present antigens, such a T-cell or T-cell progenitor (referred to as “T-APC”). Thus, in some aspects, an engineered APC of the embodiments comprises a first transgene encoding a target antigen and a second transgene encoding a human leukocyte antigen (HLA), such that the HLA is expressed on the surface of the engineered APC in complex with an epitope of the target antigen. In certain specific aspects, the HLA expressed in the engineered APC is HLA-A2.

[0665] In some aspects, an engineered APC of the embodiments can further comprise at least a third transgene encoding co-stimulatory molecule. The co-stimulatory molecule can be a co-stimulatory cytokine that can be a membrane-bound Cy cytokine. In certain aspects, the co-stimulatory cytokine is IL-15, such as membrane-bound IL-15. In some further aspects, an engineered APC can comprise an edited (or deleted) gene. For example, an inhibitory gene, such as PD-1, LIM-3, CTLA-4 or a TCR, can be edited to reduce or eliminate expression of the gene. An engineered APC of the embodiments can further comprise a transgene encoding any target antigen of interest. For example, the target antigen can be an infectious disease antigen or a tumor-associated antigen (TAA).

[0666] C. Rapid Manufacturing

[0667] In one embodiment of the present disclosure, the immune effector cells described herein are modified at a point-of-care site. In one embodiment of the present disclosure, the immune effector cells described herein are modified at or near a point-of-care site. In some cases, modified immune effector cells are also referred to as engineered T cells. In some cases, the facility or treatment site is at a hospital, at a facility (e.g., a medical facility), or at a treatment site near a subject in need of treatment. The subject undergoes apheresis and peripheral blood mononuclear cells (PBMCs) or a sub population of PBMC can be enriched for example, by elutriation or Ficoll separation. Enriched PBMC or a subpopulation of PBMC can be cryopreserved in any appropriate cryopreservation solution prior to further processing. In one instance, the elutriation process is performed using a buffer solution containing human serum albumin. Immune effector cells, such as T cells can be isolated by selection methods described herein. In one instance, the selection method for T cells includes beads specific for CD3 or beads specific for CD4 and CD8 on T cells. In one case, the beads can be paramagnetic beads. The harvested immune effector cells can be cryopreserved in any appropriate cryopreservation solution prior to modification. The immune effector cells can be thawed up to 24 hours, 36 hours, 48 hours, 72 hours or 96 hours ahead of infusion. The thawed cells can be placed in cell culture buffer, for example in cell culture buffer (e.g. RPMI) supplemented with fetal bovine serum (FBS) or human serum AB or placed in a buffer that includes cytokines such as IL-2 and IL-21, prior to modification. In another aspect, the harvested immune effector cells can be modified immediately without the need for cryopreservation. In one aspect, the elutriation step is eliminated completely.

[0668] In some cases, the immune effector cells are modified by engineering/introducing a one or more miRNA(s), a chimeric receptor, one or more cell tag(s), and/or cytokine(s) into the immune effector cells and then rapidly infused into a subject. In some cases, the sources of immune effector cells can include both allogeneic and autologous sources. In one case, the immune effector cells can be T cells or NK cells. In one case, the chimeric receptor can be a CAR. In another case, the cytokine can be IL-15 (for example, as part of a fusion protein with IL-15Rα) or IL-12. In yet another case, expression of cytokine is modulated by ligand inducible gene-switch expression systems described herein. For example, a ligand such as veledimex can be delivered to the subject to modulate the expression of the cytokine.

[0669] In another aspect, veledimex is provided at 5 mg, 10 mg, 15 mg, 20 mg, 30 mg, 40 mg, 50 mg, 60 mg, 70 mg, 80 mg, 90 mg or 100 mg. In a further aspect, lower doses of veledimex are provided, for example, 0.5 mg, 1 mg, 5 mg, 10 mg, 15 mg or 20 mg. In one embodiment, veledimex is administered to the subject 0, 1, 2, 3, 4, 5, 6, 7, 8, 9, 10, 11, 12, 13, 14, 15, 16, 17, 18, 19, 20, or 21 days prior to infusion of the modified immune effector cells. In a further embodiment, veledimex is administered about once every 12 hours, about once every 24 hours, about once every 36 hours or about once every 48 hours, for an effective period of time to a subject post infusion of the modified immune effector cells. In one embodiment, an effective period of time for veledimex administration is about: 7, 8, 9, 10, 11, 12, 13, 14, 15, 16, 17, 18, 19, 20, 21, 22, 23, 24, 25, 26, 27, 28, 29, 30 days. In other embodiments, veledimex can be re-administered after a rest period, after a drug holiday or when the subject experiences a relapse.

[0670] In certain cases, where an adverse effect on a subject is observed or when treatment is not needed, the cell tag can be activated, for example via cetuximab, for conditional in vivo ablation of modified immune effector cells comprising cell tags such as truncated epidermal growth factor receptor tags as described herein.

[0671] In some embodiments, such immune effectors cells are modified by the constructs as described herein through electroporation. In one instance, electroporation is performed with electroporators such as Lonza's Nucleofector™ electroporators. In other embodiments, the vector comprising the above-mentioned constructs is a non-viral or viral vector. In one case, the non-viral vector includes a Sleeping Beauty transposon-transposase system. In one instance, the immune effector cells are electroporated using a specific sequence. For example, the immune effector cells can be electroporated with one transposon followed by the DNA encoding the transposase followed by a second transposon. In another instance, the immune effector cells can be electroporated with all transposons and transposase at the same time. In another instance, the immune effector cells can be electroporated with a transposase followed by both transposons or one transposon at a time. While undergoing sequential electroporation, the immune effector cells can be rested for a period of time prior to the next electroporation step.

[0672] In some cases, the modified immune effector cells do not undergo a propagation and activation step. In some cases, the modified immune effector cells do not undergo an incubation or culturing step (e.g. ex vivo propagation). In some cases, the modified immune effector cells are place in PBS/EDTA buffer. In certain cases, the modified immune effector cells are placed in a buffer that includes IL-2 and IL-21 prior to infusion. In other instances, the modified immune effector cells are placed or rested in cell culture buffer, for example in cell culture buffer (e.g. RPMI) supplemented with fetal bovine serum (FBS) prior to infusion. Prior to infusion, the modified immune effector cells can be harvested, washed and formulated in saline buffer in preparation for infusion into the subject.

[0673] In one instance, the subject has been lymphodepleted prior to infusion. In other instances, lymphodepletion is not required and the modified immune effector cells are rapidly infused into the subject.

[0674] In a further instance, the subject undergoes minimal lymphodepletion. Minimal lymphodepletion herein refers to a reduced lymphodepletion protocol such that the subject can be infused within 1 day, 2 days or 3 days following the lymphodepletion regimen. In one instance, a reduced lymphodepletion protocol can include lower doses of fludarabine and/or cyclophosphamide. In another instance, a reduced lymphodepletion protocol can include a shortened period of lymphodepletion, for example 1 day or 2 days.

[0675] In some embodiments, the subject is not lymphodepleted prior to infusion.

[0676] In one embodiment, the immune effector cells are modified by engineering/introducing one or more miRNA(s), a chimeric receptor and a cytokine into said immune effector cells and then rapidly infused into a subject. In other cases, the immune effector cells are modified by engineering/introducing one or more miRNA(s), a chimeric receptor and a cytokine into said cells and then infused within at least: 0, 0.5, 1, 2, 3, 4, 5, 6, 7, 8, 9, 10, 11, 12, 13, 14, 15, 16, 17, 18, 19, 20, 21, 22, 23, 24, 25, 26, 27, 28, 29, 30, 31, 32, 33, 34, 35, 36, 37, 38, 39, 40, 41, 42, 43, 44, 45, 46, 47, 48, 49, or 50 hours into a subject. In other cases, immune effector cells are modified by engineering/introducing one or more miRNA(s), a chimeric receptor and a cytokine into the immune effector cells and then infused in 0 days, <1 day, <2 days, <3 days, <4 days, <5 days, <6 days or <7 days into a subject.

[0677] In other embodiments, a method of stimulating the proliferation and/or survival of engineered cells comprises obtaining a sample of cells from a subject, and transfecting cells of the sample of cells with one or more polynucleotides that comprise one or more transposons. In one embodiment, the transposons encode one or more miRNA(s), a chimeric antigen receptor (CAR), a cytokine, one or more cell tags, and a transposase effective to integrate said one or more polynucleotides into the genome of said cells, to provide a population of engineered cells. In an embodiment, the transposons encode one or more miRNA(s), a chimeric antigen receptor (CAR), a cytokine, one or more cell tags, gene switch polypeptides for ligand-inducible control of the cytokine and a transposase effective to integrate said one or more polynucleotides into the genome of said cells, to provide a population of engineered cells. In an embodiment, the gene switch polypeptides comprise i) a first gene switch polypeptide that comprises a DNA binding domain fused to a first nuclear receptor ligand binding domain, and ii) a second gene switch polypeptide that comprises a transactivation domain fused to a second nuclear receptor ligand binding domain. In some embodiments, the first gene switch polypeptide and the second gene switch polypeptide are connected by a linker. In one instance, lymphodepletion is not required prior to administration of the engineered cells to a subject.

[0678] In one instance, a method of in vivo propagation of engineered cells comprises obtaining a sample of cells from a subject, and transfecting cells of the sample of cells with one or more polynucleotides that comprise one or more transposons. In one embodiment, the transposons encode one or more miRNA(s), a chimeric antigen receptor (CAR), a cytokine, one or more cell tags, and a transposase effective to integrate said one or more polynucleotides into the genome of said cells, to provide a population of engineered cells. In an embodiment, the transposons encode one or more miRNA(s), a chimeric antigen receptor (CAR), a cytokine, one or more cell tags, gene switch polypeptides for ligand-inducible control of the cytokine and a transposase effective to integrate said one or more polynucleotides into the genome of said cells, to provide a population of engineered cells. In an embodiment, the gene switch polypeptides comprise i) a first gene switch polypeptide that comprises a DNA binding domain fused to a first nuclear receptor ligand binding domain, and ii) a second gene switch polypeptide that comprises a transactivation domain fused to a second nuclear receptor ligand binding domain. In some embodiments, the first gene switch polypeptide and the second gene switch polypeptide are connected by a linker. In one instance, lymphodepletion is not required prior to administration of the engineered cells to a subject.

[0679] In another embodiment, a method of enhancing in vivo persistence of engineered cells in a subject in need thereof comprises obtaining a sample of cells from a subject, and transfecting cells of the sample of cells with one or more polynucleotides that comprise one or more transposons. In some cases, one or more transposons encode one or more miRNA(s), a chimeric antigen receptor (CAR), a cytokine, one or more cell tags, and a transposase effective to integrate the DNA into the genome of said cells, to provide a population of engineered cells. In some cases, one or more transposons encode one or more miRNA(s), a chimeric antigen receptor (CAR), a cytokine, one or more cell tags, gene switch polypeptides for ligand-inducible control of the cytokine and a transposase effective to integrate the DNA into the genome of said cells, to provide a population of engineered cells. In some cases, the gene switch polypeptides comprise i) a first gene switch polypeptide that comprises a DNA binding domain fused to a first nuclear receptor ligand binding domain, and ii) a second gene switch polypeptide that comprises a transactivation domain fused to a second nuclear receptor ligand binding domain, wherein the first gene switch polypeptide and the second gene switch polypeptide are connected by a linker. In one instance, lymphodepletion is not required prior to administration of the engineered cells to a subject.

### XIII. Kits and Compositions

[0680] One aspect of the disclosure relates to kits and compositions that comprise: a CAR, a cytokine, a cell tag, and/or one or more miRNAs as described previously, or nucleic acids encoding the same. In another aspect, the kits and compositions can include RHEOSWITCH® gene switch components. These kits and compositions can include multiple vectors each encoding different proteins or subsets of proteins. These vectors can be viral, non-viral, episomal, or integrating. In some embodiments, the vectors are transposons, e.g., Sleeping Beauty transposons. In other embodiments, the vectors can comprise sequences for serine recombinase-mediated integration.

[0681] In some embodiments, the kits and compositions include not only vectors but also cells and agents such as interleukins, cytokines, interleukins and chemotherapeutics, adjuvants, wetting agents, or emulsifying agents. In one embodiment the cells are T cells. In one embodiment the kits and composition includes IL-2. In one embodiment, the kits and compositions include IL-21. In one embodiment, the kits and compositions include Bcl-2, STAT3 or STATS inhibitors. In some embodiments, the kit includes IL-15, for example as part of a fusion protein with IL-15Rα.

[0682] Disclosed herein, in certain embodiments, are kits and articles of manufacture for use with one or more methods described herein. Such kits include a carrier, package, or container that is compartmentalized to receive one or more containers such as vials, tubes, and the like, each of the container(s) comprising one of the separate elements to be used in a method described herein. Suitable containers include, for example, bottles, vials, syringes, and test tubes. In one embodiment, the containers are formed from a variety of materials such as glass or plastic.

[0683] The articles of manufacture provided herein contain packaging materials. Examples of pharmaceutical packaging materials include, but are not limited to, blister packs, bottles, tubes, bags, containers, bottles, and any packaging material suitable for a selected formulation and intended mode of administration and treatment.

[0684] For example, the container(s) include CAR-T cells (e.g., MUC16-, CD33-, and ROR1-specific CAR-T cells described herein), and optionally in addition with cytokines and/or chemotherapeutic agents disclosed herein. Such kits optionally include an identifying description or label or instructions relating to its use in the methods described herein.

[0685] A kit typically includes labels listing contents and/or instructions for use, and package inserts with instructions for use. A set of instructions will also typically be included.

[0686] In some embodiments, a label is on or associated with the container. In one embodiment, a label is on a container when letters, numbers or other characters forming the label are attached, molded or etched into the container itself; a label is associated with a container when it is present within a receptacle or carrier that also holds the container, e.g., as a package insert. In one embodiment, a label is used to indicate that the contents are to be used for a specific therapeutic application. The label also indicates directions for use of the contents, such as in the methods described herein.

[0687] The present invention relates also to pharmaceutical compositions comprising a modified immune effector cell as described above. In certain embodiments, the composition comprising an immune effector cell (e.g., T cell) modified with sequences comprising one or more miRNA(s), a CAR, one or more cell tags, and/or one or more cytokines and optionally, components of the gene switch system as described herein. In certain embodiments, the immune effector cell is modified with Sleeping Beauty transposon(s) and Sleeping Beauty transposase. For example, the Sleeping Beauty transposon or transposons can include one or more miRNA(s), a CAR, one or more cell tags, one or more cytokines and optionally, components of the gene switch system as described herein. Therefore, in some instances, the modified T-cell can elicit a CAR-mediated T-cell response.

[0688] The cells activated and expanded as described herein can be utilized in the treatment and prevention of diseases that arise in individuals who are immunocompromised. In particular, the modified T cells of the invention are used in the treatment of malignancies. In certain embodiments, the cells of the invention are used in the treatment of patients at risk for developing malignancies. Thus, the methods for the treatment or prevention of malignancies comprising administering to a subject in need thereof, a therapeutically effective amount of the modified T cells of the invention. In embodiments, the cells activated and expanded as described herein can be utilized in the treatment of malignancies.

[0689] In addition to using a cell-based vaccine in terms of ex vivo immunization, the present invention also provides compositions and methods for in vivo immunization to elicit an immune response directed against an antigen in a patient.

[0690] Briefly, pharmaceutical compositions described herein can comprise a population comprising modified immune effector cells as described herein, in combination with one or more pharmaceutically or physiologically acceptable carriers, diluents or excipients. Such compositions can comprise buffers such as neutral buffered saline, phosphate buffered saline and the like; carbohydrates such as glucose, mannose, sucrose or dextrans, mannitol; proteins; polypeptides or amino acids such as glycine; antioxidants; chelating agents such as EDTA or glutathione;

[0691] adjuvants (e.g., aluminum hydroxide); and preservatives. In some embodiments, compositions of the present invention are formulated for intravenous administration.

[0692] Pharmaceutical compositions described herein can be administered in a manner appropriate to the disease to be treated (or prevented). The quantity and frequency of administration will be determined by such factors as the condition of the patient, and the type and severity of the patient's disease.

[0693] When “an immunologically effective amount”, or “therapeutic amount” is indicated, the precise amount of the compositions described herein to be administered can be determined by a physician with consideration of individual differences in age, weight, and condition of the patient (subject). It can generally be stated that a pharmaceutical composition comprising the T cells described herein can be administered at a dosage of 10⁴ to 10⁹ cells/kg body weight, 10⁵ to 10⁶ cells/kg body weight, including all integer values within those ranges. T cell compositions can also be administered multiple times at these dosages. The cells can be administered by using infusion techniques that are commonly known in immunotherapy (see, e.g., Rosenberg et al., New Eng. J. of Med. 319:1676, (1988)). The optimal dosage and treatment regime for a particular patient can readily be determined by one skilled in the art of medicine by monitoring the patient for signs of disease and adjusting the treatment accordingly.

[0694] In certain embodiments, it can be desired to administer activated T cells to a subject and then subsequently redraw blood (or have an apheresis performed), activate T cells therefrom, and reinfuse the patient with these activated and expanded T cells. This process can be carried out multiple times every few weeks. In certain embodiments, T cells can be activated from blood draws of from 10 cc to 400 cc. In certain embodiments, T cells are activated from blood draws of 20 cc, 30 cc, 40 cc, 50 cc, 60 cc, 70 cc, 80 cc, 90 cc, or 100 cc. Not to be bound by theory, using this multiple blood draw/multiple reinfusion protocol can serve to select out certain populations of T cells. In another embodiment, it can be desired to administer activated T cells of the subject composition following lymphodepletion of the patient, either via radiation or chemotherapy.

[0695] Formulations described herein can benefit from antioxidants, metal chelating agents, thiol containing compounds and other general stabilizing agents. Examples of such stabilizing agents, include, but are not limited to: (a) about 0.5% to about 2% w/v glycerol, (b) about 0.1% to about 1% w/v methionine, (c) about 0.1% to about 2% w/v monothioglycerol, (d) about 1 mM to about 10 mM EDTA, (e) about 0.01% to about 2% w/v ascorbic acid, (f) 0.003% to about 0.02% w/v polysorbate 80, (g) 0.001% to about 0.05% w/v. polysorbate 20, (h) arginine, (i) heparin, (j) dextran sulfate, (k) cyclodextrins, (1) pentosan polysulfate and other heparinoids, (m) divalent cations such as magnesium and zinc; or (n) combinations thereof.

[0696] A “carrier” or “carrier materials” include any commonly used excipients in pharmaceutics and should be selected on the basis of compatibility with the polynucleotides, vectors, and/or cells disclosed herein, and the release profile properties of the desired dosage form. Exemplary carrier materials include, e.g., binders, suspending agents, disintegration agents, filling agents, surfactants, solubilizers, stabilizers, lubricants, wetting agents, diluents, and the like. “Pharmaceutically compatible carrier materials” can include, but are not limited to, acacia, gelatin, colloidal silicon dioxide, calcium glycerophosphate, calcium lactate, maltodextrin, glycerine, magnesium silicate, polyvinylpyrrollidone (PVP), cholesterol, cholesterol esters, sodium caseinate, soy lecithin, taurocholic acid, phosphotidylcholine, sodium chloride, tricalcium phosphate, dipotassium phosphate, cellulose and cellulose conjugates, sugars sodium stearoyl lactylate, carrageenan, monoglyceride, diglyceride, pregelatinized starch, and the like. See, e.g., Remington: The Science and Practice of Pharmacy, Nineteenth Ed (Easton, Pa.: Mack Publishing Company, 1995); Hoover, John E., Remington's Pharmaceutical Sciences, Mack Publishing Co., Easton, Pa. 1975; Liberman, H. A. and Lachman, L., Eds., Pharmaceutical Dosage Forms, Marcel Decker, New York, N.Y., 1980; and Pharmaceutical Dosage Forms and Drug Delivery Systems, Seventh Ed. (Lippincott Williams & Wilkins 1999).

[0697] “Dispersing agents,” and/or “viscosity modulating agents” include materials that control the diffusion and homogeneity of a drug through liquid media or a granulation method or blend method. In some embodiments, these agents also facilitate the effectiveness of a coating or eroding matrix. Exemplary diffusion facilitators/dispersing agents include, e.g., hydrophilic polymers, electrolytes, Tween® 60 or 80, PEG, polyvinylpyrrolidone (PVP; commercially known as Plasdone®), and the carbohydrate-based dispersing agents such as, for example, hydroxypropyl celluloses (e.g., HPC, HPC-SL, and HPC-L), hydroxypropyl methylcelluloses (e.g., HPMC K100, HPMC K4M, HPMC K15M, and HPMC K100M), carboxymethylcellulose sodium, methylcellulose, hydroxyethylcellulose, hydroxypropylcellulose, hydroxypropylmethylcellulose phthalate, hydroxypropylmethylcellulose acetate stearate (HPMCAS), noncrystalline cellulose, magnesium aluminum silicate, triethanolamine, polyvinyl alcohol (PVA), vinyl pyrrolidone/vinyl acetate copolymer (S630), 4-(1,1,3,3-tetramethylbutyl)-phenol polymer with ethylene oxide and formaldehyde (also known as tyloxapol), poloxamers (e.g., Pluronics F68®, F88®, and F108®, which are block copolymers of ethylene oxide and propylene oxide); and poloxamines (e.g., Tetronic 908®, also known as Poloxamine 908®, which is a tetrafunctional block copolymer derived from sequential addition of propylene oxide and ethylene oxide to ethylenediamine (BASF Corporation, Parsippany, N.J.)), polyvinylpyrrolidone K12, polyvinylpyrrolidone K17, polyvinylpyrrolidone K25, or polyvinylpyrrolidone K30, polyvinylpyrrolidone/vinyl acetate copolymer (S-630), polyethylene glycol, e.g., the polyethylene glycol can have a molecular weight of about 300 to about 6000, or about 3350 to about 4000, or about 7000 to about 5400, sodium carboxymethylcellulose, methylcellulose, polysorbate-80, sodium alginate, gums, such as, e.g., gum tragacanth and gum acacia, guar gum, xanthans, including xanthan gum, sugars, cellulosics, such as, e.g., sodium carboxymethylcellulose, methylcellulose, sodium carboxymethylcellulose, polysorbate-80, sodium alginate, polyethoxylated sorbitan monolaurate, polyethoxylated sorbitan monolaurate, povidone, carbomers, polyvinyl alcohol (PVA), alginates, chitosans and combinations thereof. Plasticizers such as cellulose or triethyl cellulose can also be used as dispersing agents. Dispersing agents particularly useful in liposomal dispersions and self-emulsifying dispersions are dimyristoyl phosphatidyl choline, natural phosphatidyl choline from eggs, natural phosphatidyl glycerol from eggs, cholesterol and isopropyl myristate.

[0698] Combinations of one or more erosion facilitator with one or more diffusion facilitator can also be used in the present compositions.

[0699] The term “diluent” refers to chemical compounds that are used to dilute the compound of interest prior to delivery. Diluents can also be used to stabilize compounds because they can provide a more stable environment. Salts dissolved in buffered solutions (which also can provide pH control or maintenance) are utilized as diluents in the art, including, but not limited to a phosphate buffered saline solution. In certain embodiments, diluents increase bulk of the composition to facilitate compression or create sufficient bulk for homogenous blend for capsule filling. Such compounds include e.g., lactose, starch, mannitol, sorbitol, dextrose, microcrystalline cellulose such as Avicel®; dibasic calcium phosphate, dicalcium phosphate dihydrate; tricalcium phosphate, calcium phosphate; anhydrous lactose, spray-dried lactose; pregelatinized starch, compressible sugar, such as Di-Pac® (Amstar); mannitol, hydroxypropylmethylcellulose, hydroxypropylmethylcellulose acetate stearate, sucrose-based diluents, confectioner's sugar; monobasic calcium sulfate monohydrate, calcium sulfate dihydrate; calcium lactate trihydrate, dextrates; hydrolyzed cereal solids, amylose; powdered cellulose, calcium carbonate; glycine, kaolin; mannitol, sodium chloride; inositol, bentonite, and the like.

[0700] “Filling agents” include compounds such as lactose, calcium carbonate, calcium phosphate, dibasic calcium phosphate, calcium sulfate, microcrystalline cellulose, cellulose powder, dextrose, dextrates, dextran, starches, pregelatinized starch, sucrose, xylitol, lactitol, mannitol, sorbitol, sodium chloride, polyethylene glycol, and the like.

[0701] “Lubricants” and “glidants” are compounds that prevent, reduce or inhibit adhesion or friction of materials. Exemplary lubricants include, e.g., stearic acid, calcium hydroxide, talc, sodium stearyl fumerate, a hydrocarbon such as mineral oil, or hydrogenated vegetable oil such as hydrogenated soybean oil (Sterotex®), higher fatty acids and their alkali-metal and alkaline earth metal salts, such as aluminum, calcium, magnesium, zinc, stearic acid, sodium stearates, glycerol, talc, waxes, Stearowet®, boric acid, sodium benzoate, sodium acetate, sodium chloride, leucine, a polyethylene glycol (e.g., PEG-4000) or a methoxypolyethylene glycol such as Carbowax™ sodium oleate, sodium benzoate, glyceryl behenate, polyethylene glycol, magnesium or sodium lauryl sulfate, colloidal silica such as Syloid™, Cab-O-Sil®, a starch such as corn starch, silicone oil, a surfactant, and the like.

[0702] “Plasticizers” are compounds used to soften the microencapsulation material or film coatings to make them less brittle. Suitable plasticizers include, e.g., polyethylene glycols such as PEG 300, PEG 400, PEG 600, PEG 1450, PEG 3350, and PEG 800, stearic acid, propylene glycol, oleic acid, triethyl cellulose and triacetin. In some embodiments, plasticizers can also function as dispersing agents or wetting agents.

[0703] “Solubilizers” include compounds such as triacetin, triethylcitrate, ethyl oleate, ethyl caprylate, sodium lauryl sulfate, sodium doccusate, vitamin E TPGS, dimethylacetamide, N-methylpyrrolidone, N-hydroxyethylpyrrolidone, polyvinylpyrrolidone, hydroxypropylmethyl cellulose, hydroxypropyl cyclodextrins, ethanol, n-butanol, isopropyl alcohol, cholesterol, bile salts, polyethylene glycol 200-600, glycofurol, transcutol, propylene glycol, and dimethyl isosorbide and the like.

[0704] “Stabilizers” include compounds such as any antioxidation agents, buffers, acids, preservatives and the like.

[0705] “Suspending agents” include compounds such as polyvinylpyrrolidone, e.g., polyvinylpyrrolidone K12, polyvinylpyrrolidone K17, polyvinylpyrrolidone K25, or polyvinylpyrrolidone K30, vinyl pyrrolidone/vinyl acetate copolymer (S630), polyethylene glycol, e.g., the polyethylene glycol can have a molecular weight of about 300 to about 6000, or about 3350 to about 4000, or about 7000 to about 5400, sodium carboxymethylcellulose, methylcellulose, hydroxypropylmethylcellulose, hydroxymethylcellulose acetate stearate, polysorbate-80, hydroxyethylcellulose, sodium alginate, gums, such as, e.g., gum tragacanth and gum acacia, guar gum, xanthans, including xanthan gum, sugars, cellulosics, such as, e.g., sodium carboxymethylcellulose, methylcellulose, sodium carboxymethylcellulose, hydroxypropylmethylcellulose, hydroxyethylcellulose, polysorbate-80, sodium alginate, polyethoxylated sorbitan monolaurate, polyethoxylated sorbitan monolaurate, povidone and the like.

[0706] “Surfactants” include compounds such as sodium lauryl sulfate, sodium docusate, Tween 60 or 80, triacetin, vitamin E TPGS, sorbitan monooleate, polyoxyethylene sorbitan monooleate, polysorbates, polaxomers, bile salts, glyceryl monostearate, copolymers of ethylene oxide and propylene oxide, e.g., Pluronic® (BASF), and the like. Some other surfactants include polyoxyethylene fatty acid glycerides and vegetable oils, e.g., polyoxyethylene (60) hydrogenated castor oil; and polyoxyethylene alkylethers and alkylphenyl ethers, e.g., octoxynol 10, octoxynol 40. In some embodiments, surfactants can be included to enhance physical stability or for other purposes.

[0707] “Viscosity enhancing agents” include, e.g., methyl cellulose, xanthan gum, carboxymethyl cellulose, hydroxypropyl cellulose, hydroxypropylmethyl cellulose, hydroxypropylmethyl cellulose acetate stearate, hydroxypropylmethyl cellulose phthalate, carbomer, polyvinyl alcohol, alginates, acacia, chitosans and combinations thereof.

[0708] “Wetting agents” include compounds such as oleic acid, glyceryl monostearate, sorbitan monooleate, sorbitan monolaurate, triethanolamine oleate, polyoxyethylene sorbitan monooleate, polyoxyethylene sorbitan monolaurate, sodium docusate, sodium oleate, sodium lauryl sulfate, sodium doccusate, triacetin, Tween 80, vitamin E TPGS, ammonium salts and the like.

### XIV. Methods of Treatment

[0709] The present invention also relates to a method of treating a disease or disorder comprising administering a modified immune effector cell of the present disclosure to a subject in need thereof. In certain embodiments, the cell is administered in a therapeutically effective amount.

[0710] The present invention also relates to the use of a modified immune effector cell of the present disclosure in the manufacture of a medicament for the treatment of a disease or disorder.

[0711] In some embodiments, the disease can be cancer. In certain aspects, the cancer can be hematological or a solid tumor. In other instances, the cancer is a hematologic malignancy. In some cases, the cancer is a metastatic cancer. In some cases, the cancer is a relapsed or refractory cancer. In certain aspects, the cancer is selected from B cell cancer, e.g., multiple myeloma, Waldenstrom's macroglobulinemia, the heavy chain diseases, such as, for example, alpha chain disease, gamma chain disease, and mu chain disease, benign monoclonal gammopathy, and immunocytic amyloidosis, melanomas, breast cancer, lung cancer, bronchus cancer, colorectal cancer, prostate cancer (e.g., metastatic, hormone refractory prostate cancer), pancreatic cancer, stomach cancer, ovarian cancer, urinary bladder cancer, brain or central nervous system cancer, peripheral nervous system cancer, esophageal cancer, cervical cancer, uterine or endometrial cancer, cancer of the oral cavity or pharynx, liver cancer, kidney cancer, testicular cancer, biliary tract cancer, small bowel or appendix cancer, salivary gland cancer, thyroid gland cancer, adrenal gland cancer, osteosarcoma, chondrosarcoma, cancer of hematological tissues, and the like. Other non-limiting examples of types of cancers that can be treated by the methods of the present disclosure include human sarcomas and carcinomas, e.g., fibrosarcoma, myxosarcoma, liposarcoma, chondrosarcoma, osteogenic sarcoma, chordoma, angiosarcoma, endotheliosarcoma, lymphangiosarcoma, lymphangioendotheliosarcoma, synovioma, mesothelioma, Ewing's sarcoma, Ewing's tumor, leiomyosarcoma, rhabdomyosarcoma, colon carcinoma, colorectal cancer, pancreatic cancer, breast cancer, beast adenocarcinomas e.g. triple negative breast cancer, ovarian cancer, squamous cell carcinoma, basal cell carcinoma, adenocarcinoma, sweat gland carcinoma, sebaceous gland carcinoma, papillary carcinoma, papillary adenocarcinomas, cystadenocarcinoma, medullary carcinoma, bronchogenic carcinoma, renal cell carcinoma, hepatoma, bile duct carcinoma, liver cancer, hepatocellular carcinoma (HCC), choriocarcinoma, seminoma, embryonal carcinoma, Wilms' tumor, cervical cancer, bone cancer, brain tumor, testicular cancer, lung carcinoma, small cell lung carcinoma, bladder carcinoma, epithelial carcinoma, glioma, astrocytoma, medulloblastoma, craniopharyngioma, ependymoma, pinealoma, hemangioblastoma, acoustic neuroma, oligodendroglioma, meningioma, melanoma, neuroblastoma, retinoblastoma; leukemias, e.g., acute myeloid leukemia, acute lymphocytic leukemia, mantle cell lymphoma, acute lymphoblastic leukemia, and acute myelocytic leukemia (myeloblastic, promyelocytic, myelomonocytic, monocytic and erythroleukemia); chronic leukemia (chronic myelocytic (granulocytic) leukemia and chronic lymphocytic leukemia); diffuse large B-cell lymphoma; and polycythemia vera, lymphoma (Hodgkin's disease and non-Hodgkin's disease), multiple myeloma, Waldenstrom's macroglobulinemia, and heavy chain disease.

[0712] In some instances, the cancer is a solid tumor. Exemplary solid tumors include, but are not limited to, anal cancer; appendix cancer; bile duct cancer (i.e., cholangiocarcinoma); bladder cancer; brain tumor; breast cancer; cervical cancer; colon cancer; cancer of Unknown Primary (CUP); esophageal cancer; eye cancer; fallopian tube cancer; gastroenterological cancer; kidney cancer; liver cancer; lung cancer; medulloblastoma; melanoma; oral cancer; ovarian cancer; pancreatic cancer; parathyroid disease; penile cancer; pituitary tumor; prostate cancer; rectal cancer; skin cancer; stomach cancer; testicular cancer; throat cancer; thyroid cancer; uterine cancer; vaginal cancer; or vulvar cancer.

[0713] In some instances, the cancer is a hematologic malignancy. In some cases, a hematologic malignancy comprises a lymphoma, a leukemia, a myeloma, or a B-cell malignancy. In some cases, a hematologic malignancy comprises a lymphoma, a leukemia or a myeloma. In some instances, exemplary hematologic malignancies include chronic lymphocytic leukemia (CLL), small lymphocytic lymphoma (SLL), high risk CLL, non-CLL/SLL lymphoma, prolymphocytic leukemia (PLL), follicular lymphoma (FL), diffuse large B-cell lymphoma (DLBCL), mantle cell lymphoma (MCL), Waldenstrom's macroglobulinemia, multiple myeloma, extranodal marginal zone B cell lymphoma, nodal marginal zone B cell lymphoma, Burkitt's lymphoma, non-Burkitt high grade B cell lymphoma, primary mediastinal B-cell lymphoma (PMBL), immunoblastic large cell lymphoma, precursor B-lymphoblastic lymphoma, B cell prolymphocytic leukemia, lymphoplasmacytic lymphoma, splenic marginal zone lymphoma, plasma cell myeloma, plasmacytoma, mediastinal (thymic) large B cell lymphoma, intravascular large B cell lymphoma, primary effusion lymphoma, or lymphomatoid granulomatosis. In some embodiments, the hematologic malignancy comprises a myeloid leukemia. In some embodiments, the hematologic malignancy comprises acute myeloid leukemia (AML) or chronic myeloid leukemia (CML).

[0714] In some instances, disclosed herein are methods of administering to a subject having a hematologic malignancy selected from chronic lymphocytic leukemia (CLL), small lymphocytic lymphoma (SLL), high risk CLL, non-CLL/SLL lymphoma, prolymphocytic leukemia (PLL), follicular lymphoma (FL), diffuse large B-cell lymphoma (DLBCL), mantle cell lymphoma (MCL), Waldenstrom's macroglobulinemia, multiple myeloma, extranodal marginal zone B cell lymphoma, nodal marginal zone B cell lymphoma, Burkitt's lymphoma, non-Burkitt high grade B cell lymphoma, primary mediastinal B-cell lymphoma (PMBL), immunoblastic large cell lymphoma, precursor B-lymphoblastic lymphoma, B cell prolymphocytic leukemia, lymphoplasmacytic lymphoma, splenic marginal zone lymphoma, plasma cell myeloma, plasmacytoma, mediastinal (thymic) large B cell lymphoma, intravascular large B cell lymphoma, primary effusion lymphoma, or lymphomatoid granulomatosis a modified effector cell described herein. In some instances, disclosed herein are methods of administering to a subject having a hematologic malignancy selected from AML or CML a modified effector cell to the subject.

[0715] In still other embodiments, the epithelial cancer is non-small-cell lung cancer, nonpapillary renal cell carcinoma, cervical carcinoma, ovarian carcinoma (e.g., serous ovarian carcinoma), or breast carcinoma. The epithelial cancers can be characterized in various other ways including, but not limited to, serous, endometrioid, mucinous, clear cell, brenner, or undifferentiated. In some embodiments, the methods and compositions of the present disclosure are used in the treatment, diagnosis, and/or prognosis of lymphoma or its subtypes, including, but not limited to, mantle cell lymphoma.

[0716] In some embodiments, the disease or disorder is associated with the overexpression of an antigen. In certain embodiments, the antigen is CD19, CD33, ROR1, MUC1, or MUC16. In some embodiments, the disease is ovarian cancer, a myelodysplastic syndrome (MDS).

[0717] In some embodiments, disclosed herein are methods of administering a modified effector cell comprising a polypeptide described herein to a subject having a disorder, for instance a cancer. In some cases, the cancer is a cancer associated with an expression of CD19, CD20, CD33, CD44, BCMA, CD123, EGFRvIII, α-Folate receptor, CAIX, CD30, ROR1, CEA, EGP-2, EGP-40, HER2, HER3, Folate-binding Protein, GD2, GD3, IL-13R-a2, KDR, EDB-F, mesothelin, GPC3, CSPG4, HER1/HER3, HER2, CD44v6, CD44v7/v8, CD20, CD174, CD138, L1-CAM, FAP, c-MET, PSCA, CS1, CD38, IL-11Rα, EphA2, CLL-1, CD22, EGFR, Folate receptor α, Mucins such as MUC1 or MUC16, MAGE-A1, h5T4, PSMA, CSPG4, TAG-72 or VEGF-R2.

[0718] In some embodiments, the disease is associated with the overexpression of MUC16. In certain such embodiments, the disease is ovarian cancer, breast cancer, pancreatic cancer, endometrial cancer, or lung cancer.

[0719] In some embodiments, the disease is associated with the overexpression of CD33. In certain such embodiments, the disease is acute myeloid leukemia (AML) or a myelodysplastic syndrome (MDS).

[0720] In some embodiments, the disease is associated with the overexpression of ROR1. In certain such embodiments, the disease involves a hematological tumor, for example chronic lymphocytic leukemia (CLL), mantle cell lymphoma (MCL), acute lymphoblastic leukemia (ALL), and diffuse large B-cell lymphoma (DLBCL). In certain such embodiments, the disease involves a solid tumor, for example breast adenocarcinomas encompassing triple negative breast cancer (TNBC), pancreatic cancer, ovarian cancer, and lung adenocarcinoma.

[0721] In another embodiment, a method of treating a subject with a solid tumor comprises obtaining a sample of cells from a subject, transfecting cells of the sample with one or more polynucleotides that comprise one or more transposons, and administering the population of engineered cells to the subject. In one instance, lymphodepletion is not required prior to administration of the engineered cells to a subject. In some embodiments, genetically modified T cells can be expanded and transferred into patients treated with or without preconditioning lymphodepletion according to well-known protocols. In some cases, the one or more transposons encode one or more miRNA(s), a chimeric antigen receptor (CAR), a cytokine, one or more cell tags, and a transposase effective to integrate the DNA into the genome of the cells. In some cases, the one or more transposons encode one or more miRNA(s), a chimeric antigen receptor (CAR), a cytokine, one or more cell tags, gene switch polypeptides for ligand-inducible control of the cytokine and a transposase effective to integrate the DNA into the genome of the cells. In some cases, the gene switch polypeptides comprise: i) a first gene switch polypeptide that comprises a DNA binding domain fused to a first nuclear receptor ligand binding domain, and ii) a second gene switch polypeptide that comprises a transactivation domain fused to a second nuclear receptor ligand binding domain, wherein the first gene switch polypeptide and second gene switch polypeptide are connected by a linker. In some cases, the cells are transfected via electroporation. In some cases, the polynucleotides encoding the gene switch polypeptides are modulated by a promoter. In some cases, the promoter is a tissue-specific promoter or an EF1A promoter or functional variant thereof. In some cases, the tissue-specific promoter comprises a T cell specific response element or an NFAT response element. In some cases, the cytokine comprises at least one of IL-1, IL-2, IL-15, IL-12, IL-21, a fusion of IL-15, IL-15R or an IL-15 variant. In some cases, the cytokine is in secreted form. In some cases, the cytokine is in membrane-bound form. In some cases, the cells are NK cells, NKT cells, T-cells or T-cell progenitor cells. In some cases, the cells are administered to a subject (e.g. by infusing the subject with the engineered cells). In some cases, the method further comprises administering an effective amount of a ligand (e.g. veledimex) to induce expression of the cytokine. In some cases, the transposase is salmonid-type Tc 1-like transposase. In some cases, the transposase is SB11 or SB100x transposase. In other cases, the transposase is PiggyBac. In some cases, the cell tag comprises at least one of a HER1 truncated variant or a CD20 truncated variant.

[0722] Studies conducted in patients with metastatic melanoma demonstrated that lymphodepletion prior to adoptive cell transfer dramatically improves the efficacy of therapy with in vitro expanded tumor-infiltrating lymphocytes (TILs). Muranski P, et al., “Increased intensity lymphodepletion and adoptive immunotherapy—how far can we go?” Nat Clin Pract Oncol. 2006; 3(12):668-681. Lymphodepletion likely works by multiple mechanisms, including eliminating sinks for homeostatic cytokines, such as interleukin-2 (IL-2), IL-7, and IL-15, eradicating immunosuppressive elements, such as regulatory T cells and myeloid-derived suppressor cells, inducing costimulatory molecules and downregulating indoleamine 2,3-dioxygenase in tumor cells, and promoting expansion, function, and persistence of adoptively transferred T cells. These experiences led to the use of lymphodepletion in clinical trials with CAR T-cell therapy. Kochenderfer et al showed an association between an increase in serum IL-15 levels post-lymphodepletion and clinical response after anti-CD19 CAR T-cell therapy. Kochenderfer J N, et al., “Lymphoma remissions caused by anti-CD19 chimeric antigen receptor T cells are associated with high serum interleukin-15 levels,” J Clin Oncol. 2017; 35(16):1803-1813. Turtle and colleagues showed that the addition of fludarabine to cyclophosphamide (Cy/Flu) in the lymphodepleting regimen was associated with improved anti-CD19 CAR T-cell expansion and persistence and better clinical outcome compared with non-Flu lymphodepleting regimens in patients with non-Hodgkin lymphoma. Turtle C J, et al., “Immunotherapy of non-Hodgkin's lymphoma with a defined ratio of CD8+ and CD4+ CD19-specific chimeric antigen receptor-modified T cells,” Sci Transl Med. 2016; (8)355-355ra116. Other studies indicated that the magnitude of the CAR T-cell expansion in vivo with respect to both the peak and the area under the curve over the first month may be associated with response and/or durability. Neelapu S S, et al., “Axicabtagene ciloleucel CAR T-cell therapy in refractory large B-cell lymphoma,” N Engl J Med. 2017; 377(26):2531-2544.

[0723] In some embodiments, the subject is subjected to lymphodepletion before the step of administering the modified immune effector cells to the subject. As used herein, “lymphodepletion” involves methods that reduce the number of lymphocytes in a subject, for example by administration of a lymphodepletion agent. Examples of lymphodepletion include nonmyeloablative lymphodepleting chemotherapy, myeloablative lymphodepleting chemotherapy. Lymphodepletion can also be attained by partial body or whole body fractioned radiation therapy. A lymphodepletion agent can be a chemical compound or composition capable of decreasing the number of functional lymphocytes in a mammal when administered to the mammal. One example of such an agent is one or more chemotherapeutic agents. Such agents and dosages are known, and can be selected by a treating physician depending on the subject to be treated. Examples of lymphodepletion agents include, but are not limited to, fludarabine, cyclophosphamide, cladribine, denileukin diftitox, or combinations thereof. In some embodiments, the subject is not subjected to lymphodepletion before the step of administering the modified immune effector cells to the subject.

[0724] In some embodiments, lymphodepletion is performed by administration of cyclophosphamide at a dose of about 10 mg/kg to about 100 mg/kg, preferably about 40 mg/kg to about 80 mg/kg, for example about 60 mg/kg. In such embodiments, the cyclophosphamide can be administered concomitantly with fludarabine at a dose of about 10 mg/m² to about 50 mg/m², preferably about 20 mg/m² to about 40 mg/m², for example about 30 mg/m². In some embodiments, lymphodepletion is performed by administration of fludarabine at a dose of about 10 mg/m² to about 50 mg/m², preferably about 20 mg/m² to about 40 mg/m², for example about 30 mg/m². In such embodiments, the fludarabine can be administered concomitantly with cyclophosphamide at a dose of about 200 mg/m² to about 900 mg/m², preferably about 400 to about 600 mg/m², for example 500 mg/m².

[0725] In some embodiments, patients or subjects are not lymphodepleted prior to blood being withdrawn to produce the autologous modified immune effector cells.

[0726] In some embodiments, the modified immune effector cells are autologous to the subject. In some embodiments, the modified immune effector cells are allogeneic to the subject.

[0727] In some embodiments, an amount of modified immune effector cells that is administered to a subject in need thereof and the amount is determined based on the efficacy and the potential of inducing a cytokine-associated toxicity.

[0728] The administration of compositions described herein can be carried out in any convenient manner, including by aerosol inhalation, injection, ingestion, transfusion, implantation or transplantation. The compositions described herein can be administered to a patient subcutaneously, intradermally, intratumorally, intranodally, intramedullary, intramuscularly, by intravenous (i.v.) injection, or intraperitoneally. In one embodiment, the T cell compositions of the present invention are administered to a patient by intradermal or subcutaneous injection. In another embodiment, the immune effector cell compositions of the present invention are administered by i.v. injection. The compositions of T cells can be injected directly into a lymph node, or site of primary tumor or metastasis.

[0729] The dosage of the above treatments to be administered to a patient will vary with the precise nature of the condition being treated and the recipient of the treatment. The scaling of dosages for human administration can be performed according to art-accepted practices. For example, the dose of the above treatment can be in the range of 1×10⁴ CAR+ cells/kg to 5×10⁶ CAR+ cells/kg. Exemplary doses can be 1×10² CAR+ cells/kg, 1×10³ CAR+ cells/kg, 1×10⁴ CAR+ cells/kg, 1×10⁵ CAR+ cells/kg, 3×10⁵ CAR+ cells/kg, 1×10⁶ CAR+ cells/kg, 5×10⁶ CAR+ cells/kg, 1×10⁷ CAR+ cells/kg, 1×10⁸ CAR+ cells/kg or 1×10⁹ CAR+ cells/kg. The appropriate dose can be adjusted accordingly for an adult or a pediatric patient.

[0730] Alternatively, a typical amount of immune effector cells administered to a mammal (e.g., a human) can be, for example, in the range of one hundred, one thousand, ten thousand, one million to 100 billion cells; however, amounts below or above this exemplary range are within the scope of the invention. For example, the dose of inventive host cells can be about 1 million to about 50 billion cells (e.g., about 5 million cells, about 25 million cells, about 500 million cells, about 1 billion cells, about 5 billion cells, about 20 billion cells, about 30 billion cells, about 40 billion cells, or a range defined by any two of the foregoing values), about 10 million to about 100 billion cells (e.g., about 20 million cells, about 30 million cells, about 40 million cells, about 60 million cells, about 70 million cells, about 80 million cells, about 90 million cells, about 10 billion cells, about 25 billion cells, about 50 billion cells, about 75 billion cells, about 90 billion cells, or a range defined by any two of the foregoing values), about 100 million cells to about 50 billion cells (e.g., about 120 million cells, about 250 million cells, about 350 million cells, about 450 million cells, about 650 million cells, about 800 million cells, about 900 million cells, about 3 billion cells, about 30 billion cells, about 45 billion cells, or a range defined by any two of the foregoing values).

[0731] Therapeutic or prophylactic efficacy can be monitored by periodic assessment of treated patients. For repeated administrations over several days or longer, depending on the condition, the treatment is repeated until a desired suppression of disease symptoms occurs. However, other dosage regimens can be useful and are within the scope of the invention. The desired dosage can be delivered by a single bolus administration of the composition, by multiple bolus administrations of the composition, or by continuous infusion administration of the composition.

[0732] In some embodiments, an amount of modified effector cells is administered to a subject in need thereof and the amount is determined based on the efficacy and the potential of inducing a cytokine-associated toxicity. In another embodiment, the modified effector cells are CARP and CD3⁺ cells. In some cases, an amount of modified effector cells comprises about 10⁴ to about 10⁹ modified effector cells/kg. In some cases, an amount of modified effector cells comprises about 10⁴ to about 10⁵ modified effector cells/kg. In some cases, an amount of modified effector cells comprises about 10⁵ to about 10⁶ modified effector cells/kg. In some cases, an amount of modified effector cells comprises about 10⁶ to about 10⁷ modified effector cells/kg. In some cases, an amount of modified effector cells comprises >10⁴ but ≤10⁵ modified effector cells/kg. In some cases, an amount of modified effector cells comprises >10⁵ but ≤10⁶ modified effector cells/kg. In some cases, an amount of modified effector cells comprises >10⁶ but ≤10⁷ modified effector cells/kg.

[0733] In one embodiment, the modified immune effector cells are targeted to the cancer via regional delivery directly to the tumor tissue. For example, in ovarian cancer, the modified immune effector cells can be delivered intraperitoneally (IP) to the abdomen or peritoneal cavity. Such IP delivery can be performed via a port or pre-existing port placed for delivery of chemotherapy drugs. Other methods of regional delivery of modified immune effector cells can include catheter infusion into resection cavity, ultrasound guided intratumoral injection, hepatic artery infusion or intrapleural delivery.

[0734] In one embodiment, a subject in need thereof, can begin therapy with a first dose of modified immune effector cells delivered via IP followed by a second dose of modified immune effector cells delivered via IV. In a further embodiment, the second dose of modified immune effector cells can be followed by subsequent doses which can be delivered via IV or IP. In one embodiment, the duration between the first and second or further subsequent dose can be about: 0, 1, 2, 3, 4, 5, 6, 7, 8, 9, 10, 11, 12, 13, 14, 15, 16, 17, 18, 19, 20, 21, 22, 23, 24, 25, 26, 27, 28, 29, 30 days. In one embodiment, the duration between the first and second or further subsequent dose can be about: 0, 1, 2, 3, 4, 5, 6, 7, 8, 9, 10, 11, 12, 13, 14, 15, 16, 17, 18, 19, 20, 21, 22, 23, 24, 25, 26, 27, 28, 29, 30, 31, 32, 33, 34, 35, or 36 months. In another embodiment, the duration between the first and second or further subsequent dose can be about: 0, 1, 2, 3, 4, 5, 6, 7, 8, 9 or 10 years.

[0735] In another embodiment, a catheter can be placed at the tumor or metastasis site for further administration of 1, 2, 3, 4, 5, 6, 7, 8, 9, 10 doses of modified immune effector cells. In some cases, doses of modified effector cells can comprise about 10² to about 10⁹ modified effector cells/kg. In cases where toxicity is observed, doses of modified effector cells can comprise about 10² to about 10⁵ modified effector cells/kg. In some cases, doses of modified effector cells can start at about 10² modified effector cells/kg and subsequent doses can be increased to about: 10⁴, 10⁵, 10⁶, 10⁷, 10⁸ or 10⁹ modified effector cells/kg.

[0736] The immune effector cells expressing the disclosed nucleic acid sequences, or a vector comprising the those nucleic acid sequences, can be administered with one or more additional therapeutic agents, which can be co-administered to the mammal. By “co-administering” is meant administering one or more additional therapeutic agents and the inventive host cells or the inventive vector sufficiently close in time to enhance the effect of one or more additional therapeutic agents, or vice versa. In this regard, the immune effector cells described herein or a vector described herein can be administered simultaneously with one or more additional therapeutic agents, or first, and the one or more additional therapeutic agents can be administered second, or vice versa. Alternatively, the disclosed immune effector cells or the vectors described herein and the one or more additional therapeutic agents can be administered simultaneously.

[0737] An example of a therapeutic agents that can be included in or co-administered with the inventive host cells and/or the inventive vectors are interleukins, cytokines, interferons, adjuvants and chemotherapeutic agents. In some embodiments, the additional therapeutic agents are IFN-alpha, IFN-beta, IFN-gamma, GM-CSF, G-CSF, M-CSF, LT-beta, TNF-alpha, growth factors, and hGH, a ligand of human Toll-like receptor TLR1, TLR2, TLR3, TLR4, TLR5, TLR6, TLR7, TLR8, TLR9, and TLR10.

[0738] A. Modified Immune Effector Cell Doses

[0739] In some embodiments, an amount of modified immune effector cells administered comprises about 10² to about 10⁹ modified effector cells/kg of the subject's body weight. In some embodiments, an amount of modified immune effector cells administered comprises about 10³ to about 10⁹ modified effector cells/kg of the subject's body weight. In some embodiments, an amount of modified immune effector cells administered comprises about 10⁴ to about 10⁹ modified effector cells/kg of the subject's body weight. In some cases, an amount of modified effector cells comprises about 10⁵ to about 10⁹ modified effector cells/kg of the subject's body weight. In some cases, an amount of modified effector cells comprises about 10⁵ to about 10⁸ modified effector cells/kg of the subject's body weight. In some cases, an amount of modified effector cells comprises about 10⁵ to about 10⁷ modified effector cells/kg of the subject's body weight. In some cases, an amount of modified effector cells comprises about 10⁶ to about 10⁹ modified effector cells/kg of the subject's body weight. In some cases, an amount of modified effector cells comprises about 10⁶ to about 10⁸ modified effector cells/kg of the subject's body weight. In some cases, an amount of modified effector cells comprises about 10⁷ to about 10⁹ modified effector cells/kg of the subject's body weight. In some cases, an amount of modified effector cells comprises about 10⁵ to about 10⁶ modified effector cells/kg of the subject's body weight. In some cases, an amount of modified effector cells comprises about 10⁶ to about 10⁷ modified effector cells/kg of the subject's body weight. In some cases, an amount of modified effector cells comprises about 10⁷ to about 10⁸ modified effector cells/kg of the subject's body weight. In some cases, an amount of modified effector cells comprises about 10⁸ to about 10⁹ modified effector cells/kg of the subject's body weight. In some instances, an amount of modified effector cells comprises about 10⁹ modified effector cells/kg of the subject's body weight. In some instances, an amount of modified effector cells comprises about 10⁸ modified effector cells/kg of the subject's body weight. In some instances, an amount of modified effector cells comprises about 10⁷ modified effector cells/kg of the subject's body weight. In some instances, an amount of modified effector cells comprises about 10⁶ modified effector cells/kg of the subject's body weight. In some instances, an amount of modified effector cells comprises about 10⁵ modified effector cells/kg of the subject's body weight. In some instances, an amount of modified effector cells comprises about 10⁴ modified effector cells/kg of the subject's body weight. In some instances, an amount of modified effector cells comprises about 10³ modified effector cells/kg of the subject's body weight. In some instances, an amount of modified effector cells comprises about 10² modified effector cells/kg of the subject's body weight.

[0740] In some embodiments, the modified immune effector cells are modified CAR-T cells. In some instances, the modified CAR-T cells further comprise one or more miRNA(s) as described herein. In some cases, an amount of modified CAR-T cells comprises about 10⁴ to about 10⁹ modified CAR-T cells/kg of the subject's body weight. In some cases, an amount of modified CAR-T cells comprises about 10⁵ to about 10⁹ modified CAR-T cells/kg of the subject's body weight. In some cases, an amount of modified CAR-T cells comprises about 10⁵ to about 10⁸ modified CAR-T cells/kg of the subject's body weight. In some cases, an amount of modified CAR-T cells comprises about 10⁵ to about 10⁷ modified CAR-T cells/kg of the subject's body weight. In some cases, an amount of modified CAR-T cells comprises about 10⁶ to about 10⁹ modified CAR-T cells/kg of the subject's body weight. In some cases, an amount of modified CAR-T cells comprises about 10⁶ to about 10⁸ modified CAR-T cells/kg of the subject's body weight. In some cases, an amount of modified CAR-T cells comprises about 10⁷ to about 10⁹ modified CAR-T cells/kg of the subject's body weight. In some cases, an amount of modified CAR-T cells comprises about 10⁵ to about 10⁶ modified CAR-T cells/kg of the subject's body weight. In some cases, an amount of modified CAR-T cells comprises about 10⁶ to about 10⁷ modified CAR-T cells/kg of the subject's body weight. In some cases, an amount of modified CAR-T cells comprises about 10⁷ to about 10⁸ modified CAR-T cells/kg of the subject's body weight. In some cases, an amount of modified CAR-T cells comprises about 10⁸ to about 10⁹ CAR-T cells/kg of the subject's body weight. In some instances, an amount of modified CAR-T cells comprises about 10⁹ modified CAR-T cells/kg of the subject's body weight. In some instances, an amount of modified CAR-T cells comprises about 10⁸ modified CAR-T cells/kg of the subject's body weight. In some instances, an amount of modified CAR-T cells comprises about 10⁷ modified CAR-T cells/kg of the subject's body weight. In some instances, an amount of modified CAR-T cells comprises about 10⁶ modified CAR-T cells/kg of the subject's body weight. In some instances, an amount of modified CAR-T cells comprises about 10⁵ modified CAR-T cells/kg of the subject's body weight.

[0741] In some embodiments, the modified CAR-T cells are CD19-specific CAR-T cells. In some cases, an amount of CD19-specific CAR-T cells comprises about 10⁵ to about 10⁹ CAR-T cells/kg of the subject's body weight. In some cases, an amount of CD19-specific CAR-T cells comprises about 10⁵ to about 10⁸ CAR-T cells/kg of the subject's body weight. In some cases, an amount of CD19-specific CAR-T cells comprises about 10⁵ to about 10⁷ CAR-T cells/kg of the subject's body weight. In some cases, an amount of CD19-specific CAR-T cells comprises about 10⁶ to about 10⁹ CAR-T cells/kg of the subject's body weight. In some cases, an amount of CD19-specific CAR-T cells comprises about 10⁶ to about 10⁸ CAR-T cells/kg of the subject's body weight. In some cases, an amount of CD19-specific CAR-T cells comprises about 10⁷ to about 10⁹ CAR-T cells/kg of the subject's body weight. In some cases, an amount of CD19-specific CAR-T cells comprises about 10⁵ to about 10⁶ CAR-T cells/kg of the subject's body weight. In some cases, an amount of CD19-specific CAR-T cells comprises about 10⁶ to about 10⁷ CAR-T cells/kg of the subject's body weight. In some cases, an amount of CD19-specific CAR-T cells comprises about 10⁷ to about 10⁸ CAR-T cells/kg of the subject's body weight. In some cases, an amount of CD19-specific CAR-T cells comprises about 10⁸ to about 10⁹ CAR-T cells/kg of the subject's body weight. In some instances, an amount of CD19-specific CAR-T cells comprises about 10⁹ CAR-T cells/kg of the subject's body weight. In some instances, an amount of CD19-specific CAR-T cells comprises about 10⁸ CAR-T cells/kg of the subject's body weight. In some instances, an amount of CD19-specific CAR-T cells comprises about 10⁷ CAR-T cells/kg of the subject's body weight. In some instances, an amount of CD19-specific CAR-T cells comprises about 10⁶ CAR-T cells/kg of the subject's body weight. In some instances, an amount of CD19-specific CAR-T cells comprises about 10⁵ CAR-T cells/kg of the subject's body weight.

[0742] In some embodiments, the modified CAR-T cells are CD33-specific CAR-T cells. In some cases, an amount of CD33-specific CAR-T cells comprises about 10⁵ to about 10⁹ CAR-T cells/kg of the subject's body weight. In some cases, an amount of CD33-specific CAR-T cells comprises about 10⁵ to about 10⁸ CAR-T cells/kg of the subject's body weight. In some cases, an amount of CD33-specific CAR-T cells comprises about 10⁵ to about 10⁷ CAR-T cells/kg of the subject's body weight. In some cases, an amount of CD33-specific CAR-T cells comprises about 10⁶ to about 10⁹ CAR-T cells/kg of the subject's body weight. In some cases, an amount of CD33-specific CAR-T cells comprises about 10⁶ to about 10⁸ CAR-T cells/kg of the subject's body weight. In some cases, an amount of CD33-specific CAR-T cells comprises about 10⁷ to about 10⁹ CAR-T cells/kg of the subject's body weight. In some cases, an amount of CD33-specific CAR-T cells comprises about 10⁵ to about 10⁶ CAR-T cells/kg of the subject's body weight. In some cases, an amount of CD33-specific CAR-T cells comprises about 10⁶ to about 10⁷ CAR-T cells/kg of the subject's body weight. In some cases, an amount of CD33-specific CAR-T cells comprises about 10⁷ to about 10⁸ CAR-T cells/kg of the subject's body weight. In some cases, an amount of CD33-specific CAR-T cells comprises about 10⁸ to about 10⁹ CAR-T cells/kg of the subject's body weight. In some instances, an amount of CD33-specific CAR-T cells comprises about 10⁹ CAR-T cells/kg of the subject's body weight. In some instances, an amount of CD33-specific CAR-T cells comprises about 10⁸ CAR-T cells/kg of the subject's body weight. In some instances, an amount of CD33-specific CAR-T cells comprises about 10⁷ CAR-T cells/kg of the subject's body weight. In some instances, an amount of CD33-specific CAR-T cells comprises about 10⁶ CAR-T cells/kg of the subject's body weight. In some instances, an amount of CD33-specific CAR-T cells comprises about 10⁵ CAR-T cells/kg of the subject's body weight.

[0743] In some embodiments, the modified CAR-T cells are MUC1-specific CAR-T cells. In some cases, an amount of MUC1-specific CAR-T cells comprises about 10⁵ to about 10⁹ CAR-T cells/kg of the subject's body weight. In some cases, an amount of MUC1-specific CAR-T cells comprises about 10⁵ to about 10⁸ CAR-T cells/kg of the subject's body weight. In some cases, an amount of MUC1-specific CAR-T cells comprises about 10⁵ to about 10⁷ CAR-T cells/kg of the subject's body weight. In some cases, an amount of MUC1-specific CAR-T cells comprises about 10⁶ to about 10⁹ CAR-T cells/kg of the subject's body weight. In some cases, an amount of MUC1-specific CAR-T cells comprises about 10⁶ to about 10⁸ CAR-T cells/kg of the subject's body weight. In some cases, an amount of MUC1-specific CAR-T cells comprises about 10⁷ to about 10⁹ CAR-T cells/kg of the subject's body weight. In some cases, an amount of MUC1-specific CAR-T cells comprises about 10⁵ to about 10⁶ CAR-T cells/kg of the subject's body weight. In some cases, an amount of MUC1-specific CAR-T cells comprises about 10⁶ to about 10⁷ CAR-T cells/kg of the subject's body weight. In some cases, an amount of MUC1-specific CAR-T cells comprises about 10⁷ to about 10⁸ CAR-T cells/kg of the subject's body weight. In some cases, an amount of MUC1-specific CAR-T cells comprises about 10⁸ to about 10⁹ CAR-T cells/kg of the subject's body weight. In some instances, an amount of MUC1-specific CAR-T cells comprises about 10⁹ CAR-T cells/kg of the subject's body weight. In some instances, an amount of MUC1-specific CAR-T cells comprises about 10⁸ CAR-T cells/kg of the subject's body weight. In some instances, an amount of MUC1-specific CAR-T cells comprises about 10⁷ CAR-T cells/kg of the subject's body weight. In some instances, an amount of MUC1-specific CAR-T cells comprises about 10⁶ CAR-T cells/kg of the subject's body weight. In some instances, an amount of MUC1-specific CAR-T cells comprises about 10⁵ CAR-T cells/kg of the subject's body weight.

[0744] In some embodiments, the modified CAR-T cells are MUC16-specific CAR-T cells. In some cases, an amount of MUC16-specific CAR-T cells comprises about 10⁵ to about 10⁹ CAR-T cells/kg of the subject's body weight. In some cases, an amount of MUC16-specific CAR-T cells comprises about 10⁵ to about 10⁸ CAR-T cells/kg of the subject's body weight. In some cases, an amount of MUC16-specific CAR-T cells comprises about 10⁵ to about 10⁷ CAR-T cells/kg of the subject's body weight. In some cases, an amount of MUC16-specific CAR-T cells comprises about 10⁶ to about 10⁹ CAR-T cells/kg of the subject's body weight. In some cases, an amount of MUC16-specific CAR-T cells comprises about 10⁶ to about 10⁸ CAR-T cells/kg of the subject's body weight. In some cases, an amount of MUC16-specific CAR-T cells comprises about 10⁷ to about 10⁹ CAR-T cells/kg of the subject's body weight. In some cases, an amount of MUC16-specific CAR-T cells comprises about 10⁵ to about 10⁶ CAR-T cells/kg of the subject's body weight. In some cases, an amount of MUC16-specific CAR-T cells comprises about 10⁶ to about 10⁷ CAR-T cells/kg of the subject's body weight. In some cases, an amount of MUC16-specific CAR-T cells comprises about 10⁷ to about 10⁸ CAR-T cells/kg of the subject's body weight. In some cases, an amount of MUC16-specific CAR-T cells comprises about 10⁸ to about 10⁹ CAR-T cells/kg of the subject's body weight. In some instances, an amount of MUC16-specific CAR-T cells comprises about 10⁹ CAR-T cells/kg of the subject's body weight. In some instances, an amount of MUC16-specific CAR-T cells comprises about 10⁸ CAR-T cells/kg of the subject's body weight. In some instances, an amount of MUC16-specific CAR-T cells comprises about 10⁷ CAR-T cells/kg of the subject's body weight. In some instances, an amount of MUC16-specific CAR-T cells comprises about 10⁶ CAR-T cells/kg of the subject's body weight. In some instances, an amount of MUC16-specific CAR-T cells comprises about 10⁵ CAR-T cells/kg of the subject's body weight.

[0745] In some embodiments, the modified CAR-T cells are ROR1-specific CAR-T cells. In some cases, an amount of ROR1-specific CAR-T cells comprises about 10⁵ to about 10⁹ CAR-T cells/kg of the subject's body weight. In some cases, an amount of ROR1-specific CAR-T cells comprises about 10⁵ to about 10⁸ CAR-T cells/kg of the subject's body weight. In some cases, an amount of ROR1-specific CAR-T cells comprises about 10⁵ to about 10⁷ CAR-T cells/kg of the subject's body weight. In some cases, an amount of ROR1-specific CAR-T cells comprises about 10⁶ to about 10⁹ CAR-T cells/kg of the subject's body weight. In some cases, an amount of ROR1-specific CAR-T cells comprises about 10⁶ to about 10⁸ CAR-T cells/kg of the subject's body weight. In some cases, an amount of ROR1-specific CAR-T cells comprises about 10⁷ to about 10⁹ CAR-T cells/kg of the subject's body weight. In some cases, an amount of ROR1-specific CAR-T cells comprises about 10⁵ to about 10⁶ CAR-T cells/kg of the subject's body weight. In some cases, an amount of ROR1-specific CAR-T cells comprises about 10⁶ to about 10⁷ CAR-T cells/kg of the subject's body weight. In some cases, an amount of ROR1-specific CAR-T cells comprises about 10⁷ to about 10⁸ CAR-T cells/kg of the subject's body weight. In some cases, an amount of ROR1-specific CAR-T cells comprises about 10⁸ to about 10⁹ CAR-T cells/kg of the subject's body weight. In some instances, an amount of ROR1-specific CAR-T cells comprises about 10⁹ CAR-T cells/kg of the subject's body weight. In some instances, an amount of ROR1-specific CAR-T cells comprises about 10⁸ CAR-T cells/kg of the subject's body weight. In some instances, an amount of ROR1-specific CAR-T cells comprises about 10⁷ CAR-T cells/kg of the subject's body weight. In some instances, an amount of ROR1-specific CAR-T cells comprises about 10⁶ CAR-T cells/kg of the subject's body weight. In some instances, an amount of ROR1-specific CAR-T cells comprises about 10⁵ CAR-T cells/kg of the subject's body weight.

[0746] In some embodiments, the modified T cells are engineered TCR T-cells. In some cases, an amount of engineered TCR T-cells comprises about 10⁵ to about 10⁹ TCR cells/kg of the subject's body weight. In some cases, an amount of engineered TCR cells comprises about 10⁵ to about 10⁸ TCR cells/kg of the subject's body weight. In some cases, an amount of engineered TCR cells comprises about 10⁵ to about 10⁷ TCR cells/kg of the subject's body weight. In some cases, an amount of engineered TCR cells comprises about 10⁶ to about 10⁹ TCR cells/kg of the subject's body weight. In some cases, an amount of engineered TCR cells comprises about 10⁶ to about 10⁸ TCR cells/kg of the subject's body weight. In some cases, an amount of engineered TCR cells comprises about 10⁷ to about 10⁹ TCR cells/kg of the subject's body weight. In some cases, an amount of engineered TCR cells comprises about 10⁵ to about 10⁶ TCR cells/kg of the subject's body weight. In some cases, an amount of engineered TCR cells comprises about 10⁶ to about 10⁷ TCR cells/kg of the subject's body weight. In some cases, an amount of engineered TCR cells comprises about 10⁷ to about 10⁸ TCR cells/kg of the subject's body weight. In some cases, an amount of engineered TCR cells comprises about 10⁸ to about 10⁹ TCR cells/kg of the subject's body weight. In some instances, an amount of engineered TCR cells comprises about 10⁹ TCR cells/kg of the subject's body weight. In some instances, an amount of engineered TCR cells comprises about 10⁸ TCR cells/kg of the subject's body weight. In some instances, an amount of engineered TCR cells comprises about 10⁷ TCR cells/kg of the subject's body weight. In some instances, an amount of engineered TCR cells comprises about 10⁶ TCR cells/kg of the subject's body weight. In some instances, an amount of engineered TCR cells comprises about 10⁵ TCR cells/kg of the subject's body weight.

[0747] It is to be noted that dosage values may vary with the type and severity of the condition to be alleviated. It is to be further understood that for any particular subject, specific dosage regimens should be adjusted over time according to the individual need and the professional judgment of the person administering or supervising the administration of the compositions, and that dosage ranges set forth herein are exemplary only and are not intended to limit the scope or practice of the claimed composition.

[0748] In some embodiments, the cancer whose phenotype is determined by the method of the present disclosure is an epithelial cancer such as, but not limited to, bladder cancer, breast cancer, cervical cancer, colon cancer, gynecologic cancers, renal cancer, laryngeal cancer, lung cancer, oral cancer, head and neck cancer, ovarian cancer, pancreatic cancer, prostate cancer, or skin cancer. In other embodiments, the cancer is breast cancer, prostate cancer, lung cancer, or colon cancer.

[0749] B. Combination Therapies

[0750] In certain embodiments, the modified immune effector cells and compositions thereof described herein may be used, alone or with other therapies, to treat cancers that have about 0, 5, 10, 15, 20, 25, 30, 35, 40, 45, 50, 55, 60, 65, 70, 75, 80, 85, 90, 95%, 96%, 97%, 98%, or 99% average response rate to standard therapy (including but not limited to chemotherapy, chemotherapy and current clinical trial therapies). Such cancers include but are not limited to, Hodgkin's lymphoma, melanoma, non-small cell lung cancer (NSCLC), microsatellite instability (MSI)-high or mismatch repair (MMR)-deficient solid tumors, CSCC, RCC, CRC, melanoma, Merkel cell cancer, bladder cancer, RCC, hepatocellular carcinoma (HCC), head & neck cancer (H&N), cervical cancer, gastric cancer, small cell lung cancer (SCLC), endometrial cancer, mesothelioma, ovarian cancer, triple negative breast cancer (TNBC), breast cancer, colorectal cancer (CRC), pancreatic cancer, prostate cancer.

[0751] In some embodiments, the compositions described herein can be administered as a combination therapy with an additional therapeutic agent. In some embodiments, an additional therapeutic agent comprises a biological molecule, such as an antibody. For example, treatment can involve the combined administration of the modified immune effector cells as described herein with antibodies against tumor-associated antigens including, but not limited to, antibodies that bind EGFR, HER2/ErbB2, and/or VEGF. In certain embodiments, the additional therapeutic agent is an antibody specific for a cancer stem cell marker. In certain embodiments, the additional therapeutic agent is an antibody that is an angiogenesis inhibitor (e.g., an anti-VEGF or VEGF receptor antibody). In certain embodiments, the additional therapeutic agent is bevacizumab (AVASTIN), ramucirumab, trastuzumab (HERCEPTIN), pertuzumab (OMNITARG), panitumumab (VECTIBIX), nimotuzumab, zalutumumab, or cetuximab (ERBITUX). In some embodiments, an additional therapeutic agent comprises an agent such as a small molecule. For example, treatment can involve the combined administration of the modified immune effector cells as described herein with a small molecule that acts as an inhibitor against tumor-associated antigens including, but not limited to, EGFR, HER2 (ErbB2), and/or VEGF. In some embodiments, the modified immune effector cells as described herein administered in combination with a protein kinase inhibitor selected from the group consisting of: gefitinib (IRESSA), erlotinib (TARCEVA), sunitinib (SUTENT), lapatanib, vandetanib (ZACTIMA), AEE788, CI-1033, cediranib (RECENTIN), sorafenib (NEXAVAR), and pazopanib (GW786034B). In some embodiments, an additional therapeutic agent comprises an mTOR inhibitor. In another embodiment, the additional therapeutic agent is chemotherapy or other inhibitors that reduce the number of T_{RE}G cells. In certain embodiments, the therapeutic agent is cyclophosphamide or an anti-CTLA4 antibody. In another embodiment, the additional therapeutic reduces the presence of myeloid-derived suppressor cells. In a further embodiment, the additional therapeutic is carbotaxol. In a further embodiment, the additional therapeutic agent is ibrutinib. In some embodiments, an additional therapeutic agent comprises an anti-PD-1 or anti-PDL1 inhibitor. In some embodiments, the method can further comprise one or more checkpoint inhibitors in combination with modified immune effector cells as described herein. In some embodiments, the additional checkpoint inhibitor can be an anti-CTLA-4 antibody. The anti-CTLA-4 antibody (e.g., ipilimumab) has shown durable anti-tumor activities and prolonged survival in participants with advanced melanoma, resulting in its Food and Drug Administration (FDA) approval in 2011. See Hodi et al., Improved survival with ipilimumab in patients with metastatic melanoma. N Engl J Med. (2010) Aug. 19; 363(8):711-23. In some embodiments, the one or more checkpoint inhibitors can be an anti-PD-L1 antibody. In some embodiments, the anti-PD-L1 antibody can be a full length atezolizumab (anti-PD-L1), avelumab (anti-PD-L1), durvalumab (anti-PD-L1), or a fragment or a variant thereof. In some embodiments, the one or more checkpoint inhibitors can be any one or more of CD27 inhibitor, CD28 inhibitor, CD40 inhibitor, CD122 inhibitor, CD137 inhibitor, OX40 (also known as CD134) inhibitor, GITR inhibitor, ICOS inhibitor, or any combination thereof. In some embodiments, the one or more checkpoint inhibitors can be any one or more of A2AR inhibitor, B7-H3 (also known as CD276) inhibitor, B7-H4 (also known as VTCN1) inhibitor, BTLA inhibitor, IDO inhibitor, KIR inhibitor, LAG3 inhibitor, TIM-3 inhibitor, VISTA inhibitor, or any combination thereof.

[0752] In certain embodiments, an additional therapeutic agent comprises a second immunotherapeutic agent. In some embodiments, the additional immunotherapeutic agent includes, but is not limited to, a colony stimulating factor, an interleukin, an antibody that blocks immunosuppressive functions (e.g., an anti-CTLA-4 antibody, anti-CD28 antibody, anti-CD3 antibody, anti-PD-L1 antibody, anti-TIGIT antibody), an antibody that enhances immune cell functions (e.g., an anti-GITR antibody, an anti-OX-40 antibody, an anti-CD40 antibody, or an anti-4-1BB antibody), a toll-like receptor (e.g., TLR4, TLR7, TLR9), a soluble ligand (e.g., GITRL, GITRL-Fc, OX-40L, OX-40L-Fc, CD40L, CD40L-Fc, 4-1BB ligand, or 4-1BB ligand-Fc), or a member of the B7 family (e.g., CD80, CD86). In some embodiments, the additional immunotherapeutic agent targets CTLA-4, CD28, CD3, PD-L1, TIGIT, GITR, OX-40, CD-40, or 4-1BB.

[0753] In some embodiments, the additional therapeutic agent is an additional immune checkpoint inhibitor. As used herein, “an immune checkpoint inhibitor” is an agent that inhibits the activity of an immune checkpoint protein. In some embodiments, the additional immune checkpoint inhibitor is an anti-PD-L1 antibody, an anti-CTLA-4 antibody, an anti-CD28 antibody, an anti-TIGIT antibody, an anti-LAG3 antibody, an anti-TIM3 antibody, an anti-GITR antibody, an anti-4-1BB antibody, or an anti-OX-40 antibody. In some embodiments, the additional therapeutic agent is an anti-TIGIT antibody. In some embodiments, the additional therapeutic agent is an anti-PD-L1 antibody selected from the group consisting of: BMS935559 (MDX-1105), atexolizumab (MPDL3280A), durvalumab (MEDI4736), and avelumab (MSB0010718C). In some embodiments, the additional therapeutic agent is an anti-CTLA-4 antibody selected from the group consisting of: ipilimumab (YERVOY) and tremelimumab. In some embodiments, the additional therapeutic agent is an anti-LAG-3 antibody selected from the group consisting of: BMS-986016 and LAG525. In some embodiments, the additional therapeutic agent is an anti-OX-40 antibody selected from the group consisting of: MEDI6469, MEDI0562, and MOXR0916. In some embodiments, the additional therapeutic agent is an anti-4-1BB antibody selected from the group consisting of: PF-05082566. In some embodiments, the modified immune effector cells as described herein can be administered in combination with a biologic molecule selected from the group consisting of: cytokines, adrenomedullin (AM), angiopoietin (Ang), BMPs, BDNF, EGF, erythropoietin (EPO), FGF, GDNF, granulocyte colony stimulating factor (G-CSF), granulocyte-macrophage colony stimulating factor (GM-CSF), macrophage colony stimulating factor (M-CSF), stem cell factor (SCF), GDF9, HGF, HDGF, IGF, migration-stimulating factor, myostatin (GDF-8), NGF, neurotrophins, PDGF, thrombopoietin, TGF-α, TGF-β, TNF-α, VEGF, P1GF, gamma-IFN, IL-1, IL-2, IL-3, IL-4, IL-5, IL-6, IL-7, IL-12, IL-15, and IL-18.

### XVI. Personalized Therapy

[0754] In an embodiment, the invention involves the detection of a disease or disorder associated with the overexpression of an antigen in a subject. The method of detection comprises: a) contacting a sample from a subject with one or more of the antibodies, or antigen-binding fragments thereof, that are described herein; and b) detecting an increased level of binding of the antibody or fragment thereof to the sample as compared to such binding to a control sample lacking the disease, thereby detecting the disease in the subject. In certain embodiments, the disease is cancer. In certain such embodiments, the cancer is selected from the group of ovarian cancer and breast cancer. While not intending to limit the method of detection, in one embodiment detection of binding is immunohistochemical, for example by enzyme-linked immunosorbent assay (ELISA), fluorescence-activated cell sorting (FACS), Western blot, immunoprecipitation, and/or radiographic imaging.

[0755] In an embodiment of the invention, a collection approach is used to transform the personalized cell therapy landscape for patients, including cancer patients. The approach includes the use of a developed and validated collection of non-viral plasmids to target tumor-associated antigens. These design and manufacturing advantages include the use of UltraCAR-T™ technology for generation of genetically modified cells, coupled with the capabilities of the UltraPorator™ electroporation system. These methods, compounds and compositions allow therapies and treatment options to assist cancer centers and physicians deliver personalized, autologous genetically modified cell treatments with overnight manufacturing to cancer patients. Based on the patient's cancer indication and/or biomarker profile, one or more non-viral plasmids may be selected from the library to build a personalized UltraCAR-T cell treatment. After initial treatment, this approach has potential to allow re-dosing of UltraCAR-T cells targeting the same or new tumor antigen(s) based on the treatment response and the changes in antigen expression of the patient's tumor. The combination of the advanced UltraVector™ DNA construction platform and the ease of overnight manufacturing gives this library approach an advantage over traditional T-cell therapies.

[0756] Provided herein is a method for the treatment of a disease or disorder comprising the serial administration of polynucleotides encoding a chimeric antigen receptor or a cell comprising the same. The disease or disorder may, for example, be a cancer or auto-immune disease or disorders. The polynucleotides may be present in a viral or non-viral vector. The chimeric antigen receptors selected from a collection of chimeric antigen receptors having different structural compositions and binding specificities for an array of antigen targets.

[0757] In certain embodiments, the collection of chimeric antigen receptors comprises a chimeric antigen receptor that targets at least one of the following antigens: BCMA, CAIX, CA125, CCR4, CD3, CD4, CD5, CD7, CD16, CD19, CD20, CD22, CD24, CD25, CD28, CD30, CD33, CD38, CD40, CD44, CD44v6, CD44v7/v8, CD47, CD52, CD56, CD70, CD79b, CD80, CD81, CD86, CD123, CD133, CD138, CD151, CD171, CD174, CD276, CEA, CEACAM6, CLL-1, c-MET, CS1, CSPG4, CTLA-4, DLL3, EDB-F, EGFR, EGFR2, EGFRvIII, EGP-2, EGP-40, EphA2, FAP, FLT1, FLT4, Folate-binding Protein, Folate Receptor, Folate receptor α, α-Folate receptor, Frizzled, GD2, GD3, GHR, GHRHR, GITR, GPC3, Gp100, gp130, HBV antigens, HER1, HER2, HER3, HER4, h5T4, HVEM, IGF1R, IgKAppa, IL-1-RAP, IL-2R, IL6R, IL-11Rα, IL-13R-a2, KDR, KRASG12V, LewisA, LewisY, L1-CAM, LIFRP, LRP5, LTPR, MAGE-A, MAGE-A1, MAGE-A10, MAGE-A3, MAGEA3/A6, MAGE-A4, MAGE-A6, MART-1, MCAM, mesothelin, PSCA, Mucins such as MUC1, MUC4 or MUC16, NGFR, NKG2D, Notch-1-4, NY-ESO-1, O-acetylGD2, O-acetylGD3, OX40, P53, PD1, PDE10A, PD-L1, PD-L2, PRAME, PSMA, PTCH1, RANK, Robol, ROR1, ROR1R, ROR-2, TACI, TAG-72, TCRα, TCRp, TGF, TGFBeta, TGFBeta-II, TGFBR1, TGFBR2, Titin, TLR7, TLR9, TNFR1, TNFR2, TNFRSF4, TRBC1, TWEAK-R, VEGF, VEGF-R2, and WT-1. In certain embodiments, the collection of chimeric antigen receptors comprises a chimeric antigen receptor that targets at least one of the following antigens: B7H4, BCMA, BTLA, CA125, CAIX, CCR4, CD123, CD133, CD137, CD138, CD151, CD16, CD171, CD174, CD19, CD20, CD22, CD24, CD25, CD276, CD28, CD3, CD30, CD33, CD38, CD4, CD40, CD44, CD44v6, CD44v7/v8, CD47, CD5, CD52, CD56, CD7, CD70, CD79b, CD80, CD81, CD86, CEA, CEACAM6, CLL-1, c-MET, CS1, CSPG4, CTLA-4, DLL3, EDB-F, EGFR, EGFR2, EGFRvIII, EGP-2, EGP-40, EphA2, HER1, HER2, HER3, HER4, FAP, FLT1, FLT4, Folate receptor α, Folate-binding protein, folate receptor, Frizzled, GD2, GD3, GHR, GHRHR, GITR, Gp100, gp130, GPC3, h5T4, HBV antigens, HER1/HER3, HPV antigens, HVEM, IGF1R, IgKAppa, IL-11Rα, IL-13R-a2, IL-1-RAP, IL-2R, IL6R, KDR, KRASG12V, L1-CAM, LewisA, LewisY, LIFRP, LRP5, LTPR, MAGE-A, MAGE-A1, MAGE-A10, MAGE-A3, MAGEA3/A6, MAGE-A4, MAGE-A6, MART-1, MCAM, Mesothelin, mucins such as MUC1 and MUC16, NGFR, NKG2D, Notch 1-4, NY-ESO-1, O-acetylGD2, O-acetylGD3, OX40, P53, PD1, PDE10A, PD-L1, PD-L2, PMSA, PRAME, PSCA, PSMA, PTCH1, RANK, Robol, ROR1, ROR1R, ROR-2, TACI, TAG-72, TCRα, TCRp, TGF, TGFβ, TGFβ-II, TGFBR1, TGFBR2, Titin, TLR7, TLR9, TNFR1, TNFR2, TNFRSF4, TRBC1, TWEAK-R, VEGF, VEGF-R2, and WT-1.

[0758] In certain embodiments, the method comprises a first administration of cells expressing one or more chimeric antigen receptors from the collection followed by a second administration of cells expressing one or more chimeric antigen receptors from the collection, wherein a period of time elapses between the first and second administrations. In certain embodiments, the same one or more CARs in the first administration are administered again. In certain other embodiments, at least one of the CARs expressed by cells in the second administration is different from CARs in the first administration. In certain embodiments, the invention comprises a third, fourth, fifth, sixth, seventh, eighth, ninth, tenth or any additional number of rounds of administration of cells expressing CARs selected from the collection, wherein in each subsequent round of administration a different CAR is administered which was not administered in a previous round of treatment.

[0759] In certain embodiments, the dose of the cells is autologous. In certain embodiments, the dose of cells is allogenic. In certain embodiments, one dose of the cells is autologous and another dose is allogenic.

[0760] In certain embodiments, prior to a second or subsequent administration of a CAR or CARs, a period of time is allowed to elapse that is sufficient for biologic or therapeutic activity of one or more CARs in a preceding administration to become diminished from peak biologic or therapeutic activity, become negligible or become undetectable. In certain embodiments, a subsequent administration of a CAR takes place at least one day following the previous administration of a CAR.

[0761] The polynucleotide encoding the CAR may be introduced into the cells of a subject by way of viral transduction, non-viral transfection or electroporation methods of delivery.

[0762] In certain embodiments, the polynucleotide encoding the CAR may be administered as part of a vector, such as those described herein. In certain embodiments of the invention, one or more polynucleotides encoding a CAR further comprises nucleotide sequences encoding a cytokine, a cell tag, and/or a gene switch, as described previously. In certain embodiments, the vector comprises the polynucleotide encoding the CAR and one or more polynucleotides encoding the cytokine, cell tag, and/or a gene switch.

[0763] In certain embodiments, the vector is a “regulatory approved vector,” meaning that it has been approved by a Regulatory Authority, national, supra-national (e.g., the U.S. Food and Drug Administration (FDA), the European Commission or the Council of the EU), regional, state or local regulatory agency, department, bureau, commission, council or other governmental entity, wherein such approval is necessary or sufficient for the manufacture, distribution, use or sale of a vector in a regulatory jurisdiction. In certain embodiments, such a “regulatory approved vector” means a vector which has been approved, at a minimum, for use in human clinical safety trials (sometimes referred to as “phase 1 clinical trial”) in a regulatory jurisdiction. “Clinical safety” or “Phase 1” trial means a trial to assess at least safety, optionally to assess safety and dosages, for analysis of side effects associated with the test article, optionally to assess side effects in conjunction with varying dosages. In certain embodiments, “regulatory approved vector” means a vector which has been approved, at a minimum, for use in “Phase 2” studies. A “Phase 2” study is one in which the test article is administered to a larger group human subjects (as compared to a smaller Phase 1 group of subjects) for evaluation of a larger group of patients (typically up to a few hundred) with a disease, disorder or condition for which the test article is developed, to initially assess its effectiveness and to further study its safety. In certain embodiments, a Phase 2 study is to assess the optimal dose or doses of a test article to maximize benefits, while minimizing risks. In certain embodiments, “regulatory approved vector” means a vector which has been approved, at a minimum, for use in “Phase 3” studies. A Phase 3 study (sometimes referred to as “pivotal trials”) typically involves about 300 to 3,000 participants from a patient population for which the test article is intended to be used. Participants in a Phase 3 study are typically assigned to receive either the test article or a placebo (a substance that has no therapeutic effect). A Phase 3 study is intended to demonstrate whether or not a test article offers a treatment benefit to a specific population and to provide more detailed safety data, and to serve as the basis for product labeling in regard to diseases or conditions for which the test article may be used. In certain embodiments, “regulatory approved vector” means a vector which has been approved for commercial manufacturing, use or sale for treatment of a disease, disorder or condition in humans by a regulatory authority in the regulatory jurisdiction (e.g., approval by U.S. FDA for manufacturing, use or sale in the United States of America). In certain embodiments, the “regulatory approved vector” is a regulatory approved lentivirus vector, a regulatory approved retroviral vector, or a regulatory approved non-viral vector. In some embodiments, the regulatory approved vector is a non-viral vector that is a Sleeping Beauty vector.

[0764] In certain embodiments, the regulatory authority governs approval of pharmaceuticals, biologics, or other medicines or medical treatments in a country selected from the United Arab Emirates, Antigua and Barbuda, Albania, Armenia, Angola, Austria, Australia, Azerbaijan, Bosnia and Herzegovina, Barbados, Belgium, Burkina Faso, Bulgaria, Bahrain, Benin, Brunei Darussalam, Brazil, Botswana, Belarus, Belize, Canada, Central African Republic, Congo, Switzerland, Cote d'Ivoire, Chile, Cameroon, China (People's Republic of China (PCR)), Colombia, Costa Rica, Cuba, Cyprus, Czech, Germany, Djibouti, Denmark, Dominica, Dominican Republic, Algeria, Ecuador, Estonia, Egypt, Spain, Finland, France, Gabon, United Kingdom, Grenada, Georgia, Ghana, Gambia, Guinea, Equatorial Guinea, Greece, Guatemala, Guinea-Bissau, Honduras, Croatia, Hungary, Indonesia, Ireland, Israel, India, Iran (Islamic Republic of), Iceland, Italy, Jordan, Japan, Kenya, Kyrgyzstan, Cambodia, Comoros, Saint Kitts and Nevis, Democratic People's Republic of Korea, Republic of Korea, Kuwait, Kazakhstan, Lao People's Democratic Republic, Saint Lucia, Liechtenstein, Sri Lanka, Liberia, Lesotho, Lithuania, Luxembourg, Latvia, Libya, Morocco, Monaco, Republic of Moldova, Montenegro, Madagascar, North Macedonia, Mali, Mongolia, Mauritania, Malta, Malawi, Mexico, Malaysia, Mozambique, Namibia, Niger, Nigeria, Nicaragua, Netherlands, Norway, New Zealand, Oman, Panama, Peru, Papua New Guinea, Philippines, Poland, Portugal, Qatar, Romania, Serbia, Russian Federation, Rwanda, Saudi Arabia, Seychelles, Sudan, Sweden, Singapore, Slovenia, Slovakia, Sierra Leone, San Marino, Senegal, Sao Tome and Principe, El Salvador, Syrian Arab Republic, Eswatini, Chad, Togo, Thailand, Tajikistan, Turkmenistan, Tunisia, Turkey, Trinidad and Tobago, United Republic of Tanzania, Ukraine, Uganda, United States of America, Uzbekistan, Saint Vincent and the Genadines, Viet Nam, Samoa, South Africa, Zambia, Zimbabwe, Afghanistan, Andorra, ARIPO, Bangladesh, Bolivia, Cayman Islands, Ethiopia, Fiji, Gibraltar, Guam, Haiti, Iraq, Lebanon, Martinique, Micronesia, federated states of, Nauru, OAPI, Palestinian territory, occupied (Gaza), Pitcairn, Saint Barthélemy, Somalia, Taiwan, Tonga, Vanuatu, Yemen, Åland Islands, Anguilla, Aruba, Bermuda, Burundi, Congo (Democratic Republic of the), Eurasian Patent Organization, French Guiana, Greenland, Guernsey, Holy see (Vatican), Jamaica, Macau, Mauritius, Montserrat, Nepal, Pakistan, Palestinian territory, occupied (West Bank), Puerto Rico, Saint Helena, South Sudan, Timor-Leste, Tuvalu, Venezuela, American Samoa, Argentina, Bahamas, Bhutan, Cape Verde, Eritrea, European Union, French Polynesia, Guadeloupe, Guyana, Hong Kong, Kiribati, Maldives, Mayotte, Myanmar, New Caledonia, Palau, Paraguay, Réunion, Saint Pierre and Miquelon, Suriname, Tokelau, Uruguay, and Western Sahara.

[0765] In certain embodiments, the regulatory authority is selected from a multinational organization, such as the World Health Organization, the Pan-American Health Organization, the World Trade Organization (WTO), the International Conference on Harmonization (ICH), and the World Intellectual Property Organization (WIPO); and a national health authority, such as, in Asia and the Pacific, the Australian Government: Department of Health and Ageing, Australian Government: Therapeutic Goods Administration (TGA), Brunei: Ministry of Health, People's Republic of China: State Food and Drug Administration, People's Republic of China: Ministry of Health, People's Republic of China: National Medical Products Administration, People's Republic of China: National Institute for the Control of Pharmaceutical and Biological Products, People's Republic of China: Ministry of Agriculture, Fiji: Ministry of Health, Hong Kong: Department of Health, India: Ministry of Consumer Affairs, Food & Public Distribution, India: Central Drug Standards Control Organization (CDSCO), India: Ministry of Food and Consumer Affairs, Indonesia: Ministry of Health, Japan: Ministry of Health, Labor and Welfare, Japan: Pharmaceuticals and Medical Devices Evaluation Agency, Korea: Food and Drug Administration, Malaysia: Ministry of Health, Malaysia: National Pharmaceutical Regulatory Agency, New Zealand: Ministry of Health, New Zealand: Medicines and Medical Devices Safety Authority, New Zealand: Food Safety Authority, Papua New Guinea: Department of Health, Philippines: Department of Health, Philippines: National Food Authority, Singapore: Ministry of Health, Singapore: Health Sciences Authority, Sri Lanka: Ministry of Health, Taiwan: Department of Health, Taiwan: National Laboratories of Foods and Drugs, Thailand: Ministry of Public Health, Thailand: Food and Drug Administration, Thailand: Ministry of Agriculture and Co-operatives, in Europe, the European Medicines Agency (EMA), European Commission Directorate General: Medicinal Products for Veterinary Use, Andorra: Ministry of Health and Welfare, Armenia: Ministry of Health, Armenia: Drug and Medical Technology Agency, Austria: Secretariat of Health, Belgium: Health, Food Chain Safety and Environment, Belgium: Pharmaceutical Inspectorate, Belgium: Federal Agency for the Safety of the Food Chain, Bulgaria: Ministry of Health, Bulgaria: Drug Agency, Croatia: Ministry of Health and Social Care, Czech Republic: Ministry of Health, Czech Republic: State Institute for Drug Control, Denmark: Ministry of Health, Denmark: Danish Medicines Agency, Denmark: Veterinary and Food Administration, Estonia: State Agency of Medicines, Finland: Ministry of Social Affairs and Health, Finnish Medicines Agency, France: Ministry of Health, France: National Agency for Veterinary Medicinal Products, Georgia: Ministry of Labor, Health and Social Affairs, Germany: Ministry of Health, Germany: Federal Institute for Drugs and Medical Devices, Germany: Robert Koch Institute, Germany: Paul Ehrlich Institute, Germany: Federal Institute for Risk Assessment, Germany: Ministry of Consumer Protection, Food and Agriculture, Greece: Ministry of Health and Social Solidarity, Greece: National Organization for Medicines, Hungary: Ministry of Health, Social and Family Affairs, Hungary: National Institute of Pharmacy, Iceland: Ministry for Health and Social Security, Icelandic Medicines Agency, Iceland: The Environment Agency, Ireland: Department of Health and Children, Irish Medicines Board, Italy: Ministry of Health, Italy: National Institute of Health, Latvia: State Agency of Medicines, Lithuania: Ministry of Health, Lithuania: State Medicines Control Agency, Luxembourg: Ministry of Health, Malta: Ministry of Health, Elderly and Community Care, Netherlands: Ministry of Health, Welfare and Sport, Netherlands: Medicines Evaluation Board, Netherlands: Inspectorate for Health Protection and Veterinary Public Health, Norway: Ministry of Health and Care Services, Norway: Norwegian Board of Health Supervision, Norway: Norwegian Medicines Agency, Norway: Ministry of Agriculture and Food, Poland: Ministry of Health and Social Security, Poland: Drug Institute, Portugal: Ministry of Health, Portugal: National Authority of Medicines and Health Products, Romania: Ministry of Health and the Family, Russian Federation: Scientific Centre for Expert Evaluation of Medicinal Products, Russian Federation: State Institute of Drugs and Good Practices, San Marino, Ministry of Health and Social Security, National Insurance and Gender Equality (in Italian), Slovak Republic: Ministry of Health, Slovak Republic: State Institute for Drug Control, Slovak Republic: State Veterinary and Food Administration, Slovenia: Ministry of Health, Slovenia: Institute of Public Health, Spain: Ministry of Health and Consumption; Spanish Agency for Medicines and Health Products, Sweden: Medical Products Agency, Sweden: National Board of Health and Welfare, Sweden: National Food Administration, Switzerland: Federal Office of Public Health, Switzerland: Agency for Therapeutic Products, Switzerland: Federal Veterinary Office, Turkey: Ministry of Health (in Turkish), Ukraine: Ministry of Health, UK: Department of Health, UK: Health Protection Agency, UK: Medicines and Healthcare Products Regulatory Agency (MHRA), UK: National Institute for Biological Standards and Control, UK: Veterinary Medicines Directorate, in the Middle East, the Bahrain: Ministry of Health, Israel: Ministry of Health, Israel: Ministry of Industry, Trade and Labor, Jordan: Ministry of Health, Lebanon: Ministry of Public Health, Palestinian Authority: Ministry of Health, Saudi Arabia: Ministry of Health, United Arab Emirates: Ministry of Health, United Arab Emirates: Federal Department of Pharmacies, Yemen: Ministry of Public Health & Population, in Africa, the Benin: Ministry of Health, Botswana: Ministry of Health, Egypt: Ministry of Agriculture and Land Reclamation, Ghana: Ministry of Health, Ghana: Ministry of Food and Agriculture, Kenya: Ministry of Health, Maldives: Ministry of Health, Mauritius: Ministry of Health & Quality of Life, Mauritius: Ministry of Agro Industry and Food Security, Morocco: Ministry of Public Health, Namibia: Ministry of Health and Social Services, Senegal: Ministry of Health and Prevention, South Africa: Department of Health, Swaziland: Ministry of Health and Social Welfare, Tanzania: Ministry of Health, Tunisia: Ministry of Public Health, Tunisia: Office of Pharmacy and Medicines, Uganda: Ministry of Health, Zimbabwe: Ministry of Health and Child Welfare, and in the Americas, the Argentina: Ministry of Health, Argentina: National Administration of Drugs, Foods and Medical Technology, Belize: Ministry of Health, Bolivia: Ministry of Health and Social Welfare, Brazil: Ministry of Health, Brazil: National Health Surveillance Agency, Brazil: Fundacao Oswaldo Cruz, Canada: Health Canada, Canada: Health Products and Food Branch, Chile: Health Ministry, Chile: Institute of Public Health, Colombia: Ministry of Health, Colombia: INVIMA Instituto Nacional de Vigilancia de Medicamentos y Alimentos, Costa Rica: Ministry of Health, Dominican Republic: Ministry of Agriculture, Ecuador: Ministry of Public Health, El Salvador: Ministry of Public Health and Social Assistance, El Salvador: Ministry of Agriculture, Guatemala: Ministry of Health, Guyana: Ministry of Health, Guyana: National Bureau of Standards, Jamaica: Ministry of Health, Mexico: Ministry of Health, Mexico: Federal Commission for the Protection Against Sanitary Risks, Netherlands Antilles: Department of Public Health and Environmental Protection, Nicaragua: Ministry of Health, Panama: Ministry of Health, Peru: Ministry of Health, Peru: General Directorate of Medicines, Supplies and Drugs, St. Lucia: Ministry of Agriculture, Lands Forestry and Fisheries, Trinidad and Tobago: Ministry of Health, Trinidad & Tobago: Bureau of Standards, United States of America (USA/U.S.): Food and Drug Administration (FDA), Uruguay: Ministry of Public Health, and the Venezuela: Ministry of Health and Social Development. Other exemplary regulatory authorities can also be found at http://iaocr.com/clinical-research-regulations/regulatory-authority-links/ and https://www.pda.org/scientific-and-regulatory-resources/global-regulatory-authority-websites.

[0766] In certain embodiments, cells expressing one or more CARs are isolated for continued ex vivo expansion and/or are cryopreserved for future use.

[0767] The present invention also relates to a composition comprising a chimeric antigen receptor as described above.

[0768] The present invention further relates to a kit comprising a first vector encoding a CAR as described above and a second vector encoding a CAR as described above.

### EXAMPLES

[0769] These Examples are provided for illustrative purposes only and not to limit the scope of the claims provided herein. The following table includes abbreviations and special terms that apply to the Examples only. These abbreviations and special terms are not otherwise limiting, and neither replace nor narrow the broader definitions set forth above, which shall continue to apply to the claims.

TABLE 9
Abbreviations and Special Terms for Use in the Examples

| Abbreviation of | |
|---|---|
| Special Term | Explanation |
| Artificial | A non-naturally occurring miRNA designed to target |
| miRNA | a specific gene |
| CAR-T | Chimeric Antigen Receptor T Cell |
| Guide miRNA | The mature miRNA processed from the pre-miRNA that |
| | is complementary to an intended target gene |
| LFC | Log2 fold change |
| Mature miRNA | The fully processed 21-23nt miRNA |
| mbIL15 | A fusion protein comprising IL-15 and IL-15Rα, |
| | the protein comprising the amino acid sequence of |
| | SEQ ID NO: 525 |
| miRNA | microRNA, a small RNA species generally 21-23nt |
| | in length that is complementary to a target mRNA |
| | transcript and reduces expression of the target |
| | transcript through either RNA degradation or |
| | inhibition of translation |
| Passenger | A mature miRNA that may be processed from the side |
| miRNA | opposite of the guide miRNA in the RNA stem-loop |
| PD1 Silencer | A genetic module encoded within the VVN-5351 trans- |
| Module | gene cassette designed to reduce expression of PD1 |
| | within ROR1 + PD1 silencer cells. The module |
| | consists of a splice unit containing a non-coding |
| | RNA that is processed by internal cellular machinery |
| | into 2 unique microRNAs with homology to PD1 mRNA. |
| Pre-miRNA | Precursor miRNA, which is the intermediate miRNA |
| | species that has undergone the first processing step |
| | to remove the RNA stem-loop structure from the primary |
| | mRNA transcript. Pre-miRNA undergoes a second pro- |
| | cessing step in which the mature miRNA is cleaved and |
| | loaded into the RNA-induced silencing complex (RISC). |
| R0R1 + PD1 | ROR1 CAR-T cells expressing mbIL15 and HER1t with |
| silencer cells | anti-PD-1 miRNAs |
| Pri-miRNA/ | The primary transcript encoding RNA stem-loop struc- |
| pri-miRNA | tures that are processed by the endogenous cellular |
| scaffold | machinery into precursor and then mature miRNA. The |
| | artificial pri-miRNA sequence and structures are |
| | based on endogenous human pri-miRNAs, herein referred |
| | to as a scaffold, with the natural guide and passenger |
| | strands replaced with a guide miRNA to target PD1 |
| | and a passenger miRNA to maintain the predicted |
| | folded RNA structure. |
| UTR | Untranslated region |
| VVN-5351 | A DNA transposon plasmid encoding the ROR1 |
| | UltraCAR-T transgene cassette plus a dual PD1- |
| | targeting miRNA in the 5′UTR encoded within a |
| | synthetic splice unit. |
| VVN-5355 | A DNA transposon plasmid encoding the ROR1 |
| | UltraCAR-T transgene cassette. |

### Example 1. PD1 Module Design

[0770] The PD1-silencing module of miRNA-expressing ROR1 UltraCAR-T cells encodes two artificial miRNAs designed to specifically reduce expression of PD-1 mRNA within UltraCAR-T cells while avoiding off-target silencing of other endogenous transcripts. The two artificial miRNAs of miRNA-expressing ROR1 UltraCAR-T cells are encoded within a dual primary miRNA (pri-miRNA) sequence placed within a 5′ UTR splice unit of the UltraCAR-T transgene cassette (FIG. 1B). The dual pri-miRNA forms stem-loop structures that are recognized and processed by cellular complexes to generate two unique 21-24 nucleotide mature guide miRNAs that are homologous to specific sequences within the PD1 target transcript. Interaction of the guide miRNAs with the PD1 target sequence is expected to trigger the silencing of PD1 by induction of RNA degradation or translational inhibition (Guo et al, 2010).

[0771] The guide miRNAs encoded within miRNA-expressing ROR1 UltraCAR-T cells were designed to be highly specific for the PD1 target transcript NM_005018.3 by implementation of an internally-designed computational workflow using a combination of twenty-one ranking parameters based on three validated rules-based siRNA prediction algorithms (Amarzguioui and Prydz, 2004; Reynolds et al, 2004; Ui-Tei et al, 2004). Multi-level specificity profiling was performed against the human reference exome (RefSeq) and the activated T-cell transcriptome (Zhao et al, 2014) to ensure that the mature miRNAs are highly specific for the PD1 target gene. To further reduce risk of off-target silencing by the non-PD1 targeting passenger strand miRNAs, pri-miRNA scaffolds were selected that produce a high ratio of guide:passenger miRNA (Miniarikova et al, 2016). The PD1-targeting guide miRNA PD1_1843 was incorporated into a pri-miRNA scaffold based on human miRNA hsa-miR-204 (accession #MI0000284) while the PD1_2061 guide miRNA was incorporated into the hsa-miR-206 (accession #MI0000490) scaffold. Mutations were created on the passenger strand side of each pri-miRNA to assure the specific miRNA structure was maintained and that thermodynamic stability was not substantially altered. RNA structures were predicted using CLC Main Workbench software. The PD1 silencing module contains the miR204 PD1_1843 pri-miRNA placed directly upstream of miR206 PD1_2061 pri-miRNA within a synthetic splice unit in the 5′ UTR of the CAR-T transgene expression cassette. The splice units were ordered as gBlock from IDT and can be cloned into Sleeping Beauty CAR vectors and can be cut using ClaI/NheI for cloning into the 5′UTR of any other Sleeping Beauty CAR vector.

### Example 2. Reduction of PD1 Transcript Expression by miRNAs

[0772] Primary human T cells were transfected with the constructs listed in Table 10 and expanded in vitro with the use of AaPC cells expressing cognate antigen that were grown in large batches and then frozen into aliquots. The generated CAR-T cells were then further activated using anti-CD3/anti-CD28 beads at a bead:T cell ratio of 1:1 and 1×10⁶ T cells/mL for 48 hrs prior to harvesting the cells for RNA isolation. RNA isolation was performed according to manufacturer's recommended protocol (Qiagen) then subjected to RT-qPCR analysis using the SuperScript VILO Master Mix with ezDNase (Invitrogen) and TaqMan FAST Advanced master mix for qPCR to evaluate PD-1 expression levels using specific primer/probes (Human PD1: Hs00169472_m1; Human TIGIT: Hs00545087_m1; and Human ACTb: Hs99999903_m1). All samples were also normalized to beta-actin expression levels. The relative expression values are based upon MET method by normalizing to construct #1 (MUC16 CAR-T cells only). Results are shown in FIG. 2. Shown is the mean±SD from 3 donors.

TABLE 10
Description of constructs 1-8 as utilized in FIG.
2 sequences of miRNA are as described in Table 4)

| Construct | | |
|---|---|---|
| # | miRNA | Effector Genes |
| 1 | N/A | MUC16 CAR-mbIL15-HER1t |
| 2 | Scrambled 1 (SEQ ID NO: | MUC16 CAR-mbIL15-HER1t |
| | 586) | |
| 3 | Scrambled 2 (SEQ ID NO: | MUC16 CAR-mbIL15-HER1t |
| | 582) | |
| 4 | miR204 PD1 + miR206 | MUC16 CAR-mbIL15-HER1t |
| | PD1 | |
| 5 | miR17 TIGIT | MUC16 CAR-mbIL15-HER1t |
| 6 | miR150 TIGIT + miR206 | MUC16 CAR-mbIL15-HER1t |
| | PD1 | |
| 7 | miR204 PD1 + miR206 | MUC16 CAR-mbIL15-HER1t |
| | PD1 + miR17 TIGIT | |
| 8 | N/A | MUC16 CAR + HER1t |

[0773] The data demonstrates the specificity of PD-1 checkpoint inhibitor miRNA targeting the intended sequence. CAR constructs that expressed the scrambled miRNA (Constructs 2 and 3) along with the CAR construct that did not express mbIL-15 (construct #8) did not show any decrease in PD-1 expression whereas CAR constructs that contain PD-1 miRNA (construct 4) or a combination of PD-1 and TIGIT miRNA (constructs 6 and 7) did show a decrease in PD-1 expression. On the other hand, the CAR construct containing only a TIGIT miRNA sequence (construct 5) did not show any decrease in PD-1 mRNA expression levels further demonstrating the specificity in targeting.

### Example 3. Downregulation of Targeted mRNA

[0774] Primary human T cells were transfected with a vector encoding CD33-specific CAR or a vector encoding MUC16-specific CAR. The vectors comprise a synthetic intron containing miRNA sequences that target PD-1, PD-1 and/or TIGIT or a non-targeting scrambled control miRNA. T cell cultures were in vitro expanded using antigen presenting cells with cognate tumor antigen that were K562 cells modified to express either CD33 or MUC16 plus other co-stimulatory molecules (based on “Clone 1”) and at a ratio of 1:1 (AaPC:T cell). The generated CAR+ cells were then stimulated with anti-CD3/anti-CD28 beads (1:1 bead:T cell ratio) in the absence of cytokines for 48 hrs. RNA was isolated using Qiagen kits (AllPrep Universal DNA/RNA/miRNA kit #80224) as per manufacturer's protocol and utilized for the Human PanCancer Immune gene set panel Kit from Nanostring. Briefly, the RNA was hybridized with capture and reporter probe sets and samples processed then hybridized to the slide using the nCounter Prep Station and transcript counts were generated by the nCounter Digital Analyzer according to the manufacturer's protocol. Data validation, QC and normalization were performed by nSolver software (Nanostring Technologies).

[0775] The distribution of the transcript count data on the graph would be a line (from lower left to top right corner) with the slope of 1 if the samples were identical. Data points falling off this line represent variations in transcript counts between the two samples. Counts that were found below the main line represent reduced expression whereas counts above the main line represent increased expression to the sample being compared. The transcript targeted by the miRNA, either PD-1 or TIGIT expressed in the CAR-T cells, specifically showed lower expression of the transcripts of their respective targeted genes compared to the CAR-T cells without the miRNA. See FIG. 3A-B. In addition, to further demonstrate the specificity of targeting, the CAR-T cells with the scrambled control miRNA had no alterations to the transcript levels of either PD-1 or TIGIT, as the data distribution in this graph remained close to the diagonal indicating very little variation in transcript levels. See FIG. 3C. Similar results were observed in T cells transfected with the MUC16 CAR vector comprising a synthetic intron containing miRNA sequences that target PD-1, PD-1 and/or TIGIT (see FIG. 4A-C).

### Example 4. Enhancement of Tumor Cell Cytotoxicity Effect of miRNA MUC16 CAR-T Cells

[0776] Primary human T cells were transfected with a vector encoding MUC16-specific CAR and miRNA sequences that target two sequences within the PD-1 transcript, or with a vector that encodes the MUC16-specific CAR but not an miRNA. CAR-T cells used in this assay were in vitro expanded, normalized for CAR expression then seeded in triplicates with GFP+ K562 cells expressing MUC16 (“tumor cells”) in 96 well plates at the 3:1 E:T ratios. The plate was loaded into the IncuCyteS3 instrument and 4 images per well were taken every 2 hr for 7 days. The IncuCyte Software was used to analyze the data and normalize the GFP+ cell counts/image to the 0 hr time point.

[0777] The outgrowth assay determines the rate of target cell growth in the presence or absence of CAR-T cells over the course of 7 days in culture. The lower target cell count in cultures containing CAR-T cells indicate the CAR-T cytolytic activity. FIG. 5A depicts the difference between the tumor target cells only (black circle, filled) and the cells expressing the MUC16-specific CAR only (open square), demonstrating the killing capacity of the MUC16 CAR-T cells. The cells further expressing miRNA targeting PD-1 (grey circle filled) further demonstrates improved cytolytic activity, based upon the sustained low GFP+ counts over the time course evaluation, compared to the cells expressing MUC16 specific CAR only (open square). This data demonstrates the enhanced cytolytic activity of CAR-T cells containing PD-1 targeting miRNA.

[0778] A similar experiment was conducted utilizing GFP+ K562 cells expressing MUC16, PD-L1, and CD155. As shown in FIG. 5B, the difference between the tumor target cells only (square, filled) and cells expressing the CAR only (circle, open), demonstrates the killing capacity of the MUC16 CAR-T cells. The CAR-T cells incorporating miRNAs targeting both PD-1 and TIGIT (circle, filled) further demonstrates improved cytolytic activity, based upon the sustained low GFP+ counts over the time course evaluation, compared to the MUC16 CAR-T cells only (circle, filled). This data demonstrates the enhanced cytolytic activity of CAR-T cells containing 3 targeting miRNAs (2 for PD-1 and 1 for TIGIT) in a single construct.

### Example 5. Improvement of Cytokine Expression

[0779] Primary human T cells were transfected with vectors encoding MUC16-specific CAR but not miRNA targeting sequences, and vectors encoding MUC16-specific CAR and single or combinations of miRNA targeting sequences of PD-1 and TIGIT (see Table 11). In vitro expanded CAR-T cells were in vitro expanded, normalized for CAR expression then seeded in triplicates in 96 well plates with K562 tumor target cells expressing truncated MUC16 9MUC16t) at an effector to target ratio of 1:1 or the CAR-T cells were cultured in media alone. Culture supernatants were collected after co-culturing for 3 days. Culture supernatants were collected and interferon-gamma (IFNγ) and granulocyte/macrophage-colony stimulating factor (GM-CSF) was assessed by multiplex cytokine analysis (Luminex) according to manufacturer's protocol. Shown in FIG. 6 is the mean±SD from duplicate wells.

[0780] For the CAR-T cell constructs cultured in media only had basal levels of IFNγ and GM-CSF detected. No cytokines were observed from the use of target cells or media only. The supernatants following co-culture of MUC16 CAR-T cells only (Vector 1) with the tumor cells provided a baseline value for expression levels of IFNγ and GM-CSF. With the inclusion of checkpoint inhibitor miRNA into the CAR constructs, improved cytokine expression may be observed, particularly through inhibition via the PD-1 pathway. In the constructs that contained dual PD-1 (Construct #3) or the combination of a single PD-1 and TIGIT miRNA (Construct #6) or dual PD-1 and a TIGIT miRNA (Constructs #10 and 11) provided higher levels of cytokine expression.

TABLE 11
Description of Constructs #1-11 in FIGS. 6A-D
(sequences of miRNA are as described in Table 4)

| Constructs | miRNA | Effector genes |
|---|---|---|
| 1 | N/A | MUC16 CAR-mbIL15-HER1t |
| 2 | Scrambled control 1 | MUC16 CAR-mbIL15-HER1t |
| 3 | miR204 PD1 + miR206 PD1 | MUC16 CAR-mbIL15-HER1t |
| 4 | miR17 TIGIT | MUC16 CAR-mbIL15-HER1t |
| 5 | miR17 TIGIT + miR206 | MUC16 CAR-mbIL15-HER1t |
| | PD1 | |
| 6 | miR150 TIGIT + miR206 | MUC16 CAR-mbIL15-HER1t |
| | PD1 | |
| 7 | miR17 TIGIT + miR204 | MUC16 CAR-mbIL15-HER1t |
| | PD1 + miR206 PD1 | |
| 8 | miR17 TIGIT + miR204 | MUC16 CAR-mbIL15-HER1t |
| | PD1 + miR206 PD1extended | |
| | v1 | |
| 9 | miR17 TIGIT + miR204 | MUC16 CAR-mbIL15-HER1t |
| | PD1 + miR206 PD1extended | |
| | v2 | |
| 10 | miR204 PD1 + miR206 | MUC16 CAR-mbIL15-HER1t |
| | PD1 + miR17 TIGIT | |
| 11 | miR204 PD1 + miR206 | MUC16 CAR-mbIL15-HER1t |
| | PD1 + miR17 TIGITextended | |
| | v1 | |

### Example 6. Tumor Burden in Treated Mice

[0781] Non-obese diabetic/severe combined immunodeficiency (NOD/SCID) gamma mice (NSG) mice were intraperitoneally implanted with fLUC-GFP+SK-OV-3 tumor cells expressing MUCt on Day 0. Tumor burden was monitored in these mice throughout the study using an in vivo imaging system (IVIS) by luminescence with an IVIS Spectrum instrument (Perkin Elmer). IVIS data was analyzed using the Living Image Software (Version 4.1) based upon a defined region of interest to obtain total flux values (photons/sec). Prior to administration of the CAR-T cells, mice were randomized based upon tumor burden and body weight into the different groups then administered the test articles on Day 6 All CARs tested expressed the MUC16-specific CAR along with mbIL15 and HER1t and are referred to as MUC16 CAR. All test articles were normalized to a 0.5×10⁶ CAR-T cells/mouse and administered intraperitoneally. IVIS imaging was performed twice/week to monitor overall tumor burden in the mice. Data shown is the mean±SEM from n=4-8 mice/group.

[0782] As shown in FIG. 7, mice given saline only (gray-filled circles), had continuous tumor growth as evidenced by the increasing total flux levels observed throughout the course of the study. Eventually, these mice succumbed to the tumor burden and were euthanized. Mice given the MUC16 CAR only (black-filled squares) were able to control tumor burden. CAR-T cells expressing the checkpoint inhibitor miRNA to PD-1 and TIGIT within the constructs (open squares and circles) were found to maintain anti-tumor activity, based upon the decrease in tumor flux values to background levels. In addition, the CAR-T cells expressing the checkpoint inhibitor miRNA to PD-1 and TIGIT showed a faster time frame and the rate of tumor burden decrease compared to the MUC16 CAR only construct.

### Example 7. In Vivo Phenotyping Experiment

[0783] SKOV-3/MUC16 tumor bearing mice were administered CAR-T cells (expressing MUC16-specific CAR, mbIL15 and HER1t) of either CAR only or CAR with PD-1/PD-1 miRNA on Study Day 6. Whole blood from mice were taken on Study Day 31 for phenotypic evaluation by flow cytometry of the administered CAR-T cells. Briefly, cocktails of fluorescently conjugated antibodies were used to stain the whole blood samples then concurrently fixed along with red blood cells lysis using a one-step Fix/Lyse buffer. The fixed samples were read on the flow cytometer (BD LSRFortessaX-20) instrument. CAR-T cells were identified based upon gating of hCD45/CD3+/HER1t+ expression. In, FIG. 8A, the sample of CAR only (dotted line) shows high PD-1 expression, whereas the CAR with PD-1/PD-1 miRNA (solid line) shows a significant decrease in the level of PD-1 expression detected. To further quantify the reduced expression of PD-1 detected on the CAR+ miRNA (PD-1/PD-1) group, the median fluorescent intensity (MFI) was examined (FIG. 8B). The mean MFI of PD1 expression in mice given CAR-T cells (stripe bar) only was ˜709 whereas the mean MFI of the CAR-T cells with a PD-1/PD-1 miRNA (solid bar) was reduced down to ˜236. The mean±SEM from 5-8 mice is shown.

### Example 8. Specific PD-1 and TIGIT Downregulation

[0784] SKOV-3 tumor bearing mice were administered CAR-T cells (expressing MUC16-specific CAR (“MUC16 CAR”), mbIL15 and HER1t) of either CAR only or CAR with different checkpoint miRNA inhibitors (PD-1 and TIGIT) on Study Day 6. See Table 12.

TABLE 12
Description of Groups #1-9 in FIGS. 9A-B

| Group | CAR-T Cells |
|---|---|
| 1 | Saline control |
| 2 | MUC16 CAR/mbIL15/HER1t |
| 3 | MUC16 CAR/mbIL15/HER1t + anti-PD1 |
| 4 | MUC16 CAR/mbIL15/HER1t + scrambled miRNA 2 |
| 5 | MUC16 CAR/mbIL15/HER1t + miR206 PD1 |
| 6 | MUC16 CAR/mbIL15/HER1t + miR17 TIGIT |
| 7 | MUC16 CAR/mbIL15/HER1t + miR204 PD1/miR206 |
| | PD1 |
| 8 | MUC16 CAR/mbIL15/HER1t + miR150 TIGIT/miR206 |
| | PD-1 |
| 9 | MUC16 CAR/mbIL15/HER1t + miR204 PD1/miR206 |
| | PD1/miR150 TIGIT |

[0785] Whole blood from mice were taken on Study Day 45 (D45) for phenotypic evaluation by flow cytometry of the administered CAR-T cells. Briefly, cocktails of fluorescently conjugated antibodies, which included specific antibodies for human PD-1 and human TIGIT, were used to stain the whole blood samples then fixed using a one step Fix/Lyse buffer. The fixed samples were read on the flow cytometer (BD LSRFortessaX-20) instrument. CAR-T cells were identified in the mouse based upon gating of hCD45/CD3+/HER1t+ expression. To further evaluate the specificity of miRNA used in the CAR vector for the checkpoint inhibitor, the median fluorescent intensity (MFI) for expression of PD-1 and TIGIT was analyzed (FIGS. 9A and B). The MFI for PD-1 is shown on the left and the MFI for TIGIT is shown on the right for a quantitative assessment of the expression levels for the same set of vectors. As shown in FIG. 9A, reduced expression of PD-1 was seen on the CAR-T cells for the groups indicated with the down arrows (solid line for PD-1), which are constructs with a PD-1 miRNA (single, double and in combination with another miRNA checkpoint inhibitor), when compared to the CAR vector only. On the right side (downward dashed arrows) highlights cell populations with a reduced expression of TIGIT expression seen on the CAR-T cells. The downregulated expression of TIGIT corresponded to the samples that contained a miRNA for TIGIT (either as a single or in combination with other checkpoint miRNA inhibitors). The mean±SEM from 5-8 mice is shown.

### Example 9. Expression of PD1-Targeting miRNAs in ROR1-Targeted CAR-T Cells

[0786] Briefly, miRNA-expressing ROR1 UltraCAR-T cells or control ROR1 UltraCAR-T cells were generated from T cells from five donors. PanT cells from five healthy donors were transfected with an indicated transposon vector (VVN-5355 or VVN-5351) plus SB11 transposase vector, and expanded by weekly stimulations for 4 weeks (˜35 days before adding beads) with ROR1 antigen presenting cells. Following a rest period of 7-8 days, UltraCAR-T cells were activated with CD3/CD28 dynabeads (1:1 bead: T cell ratio, T cells at 1×10⁶ cells/mL) for 48 hours prior to RNA harvest, 7-8 days after the last AaPC stimulation. Expression of PD1-targeting guide miRNAs and the impact on PD1 mRNA expression were verified by RT-qPCR. Small RNAseq, which is an established method to identify the predicted and alternate miRNA sequences that may arise from a pri-miRNA (Borel et al, 2018; Miniarikova et al, 2016), was performed to compare expression levels of the PD1-targeting guide miRNAs to additional small RNA species, such as passenger miRNA, that may be generated from the PD1 silencer module. Small RNAseq was also used to assess potential changes on global endogenous miRNA expression (Mueller et al, 2012). RNAseq analysis was performed to evaluate global transcript expression and to identify changes in molecular pathway signaling or off-target gene silencing attributed to the PD1 silencer. In silico miRNA target prediction was performed using the miRanda algorithm to identify most likely targets of miRNAs generated from the PD1 silencer module. Expression of the predicted target genes was evaluated by RNAseq. Details of each method is included in the sections below.

[0787] To characterize expression of miRNAs encoded by the PD1 silencer and impact on PD1 transcript levels, RT-qPCR and small RNAseq were performed. To characterize changes in specific genes or cellular pathways, RNAseq was performed.

[0788] Nucleic acids were purified from cell pellets using Qiagen's AllPrep DNA/RNA/miRNA Universal kit (Cat #80224) following the manufacturers protocol. Total RNA was eluted in 50 uL nuclease-free water and concentration measured on a Nanodrop™ 2000 spectrophotometer.

[0789] To quantify the expression of PD1 guide and passenger miRNAs, total RNA was used as input for cDNA synthesis using Qiagen's miRCURY LNA RT Kit (#339340). Per the manufacturer's protocol, cDNA was diluted 1:60 with nuclease-free water and 3 μL of the diluted cDNA was used as input for qPCR using miRCURY LNA SYBR Green PCR Kit (Qiagen #339345) with custom miRCURY LNA primers specific to the two PD1 guide miRNAs. An endogenous miRNA, hsa-let-7a-5p, was quantified as a reference small RNA to allow for input normalization (Qiagen product #339306 with custom #YP00205727). Samples were run in a 384 well format on a QuantStudio 6 Flex instrument. Relative quantification (dCT) calculations were performed in Microsoft Excel and data graphed in GraphPad Prism 9. Calculations for dCT were performed on each technical replicate as follows:

dCT=CT(guide miRNA)−CT(hsa-let-7a)

ddCT=dCT(miRNACART replicate)−dCT(average of VVN-5355 technical replicates)

Fold Change=2\hat{ }-ddCT

[0790] The VVN-5355 ROR1 UltraCAR-T control sample serves as the reference control sample for comparison to miRNA expressing ROR1 UltraCAR-T cells within each donor set. Average fold change and standard deviation of technical replicates was calculated and reported in FIG. 10A.

[0791] To quantify and compare the production of guide and passenger miRNAs originating from the PD1 silencing module, RT-qPCR was performed as described above, except this second experiment included primer assays to detect the passenger miRNAs as well as an additional endogenous reference small RNA, RNU1A1. Expression calculations were performed to compare expression of each guide or passenger strand mature miRNA relative to the average of the endogenous control small RNAs as follows:

dCT=CT(mature miRNA)−CT(average of hsa-let-7a and RNU1A1)

Fold change=2\hat{ }-dCT

[0792] Average fold change was calculated from three technical replicates. These values are plotted in FIG. 11 with mean and standard deviation shown for the donor sample sets tested.

[0793] To quantify the expression of endogenous PD1 mRNA, cDNA synthesis was performed using a final RNA concentration of 5 ng/μL using Invitrogen's SuperScript IV VILO Master Mix with ezDNase enzyme kit (#11766050). Multiplex Taqman qPCR was performed using Invitrogen's TaqMan MastAdvanced Master Mix (#4444963) with 1 microliter of cDNA and Invitrogen (ThermoFisher Scientific) Taqman assays. Human PD1 Taqman assay (Invitrogen #Hs00169472_m1) was FAM labeled and the internal normalizer gene, ACTb (Invitrogen #Hs99999903_m1), which was VIC-labelled. Samples were run in a 384 well format on a QuantStudio 6 Flex instrument. Relative quantification (dCT) calculations were performed in Microsoft Excel as described above and data graphed in GraphPad Prism 9.

TABLE 13
Test and Control Articles

| Sample Name | Description | Designation |
|---|---|---|
| VVN-5355 | CAR-T cells generated using Sleeping | Control |
| | Beauty transposon plasmid VVN-5355, | |
| | which contains a transgene cassette | |
| | to express ROR1-specific CAR + | |
| | mbIL-15 + HER1t. | |
| VVN-5351 | CAR-T cells generated using Sleeping | Test |
| | Beauty transposon plasmid VVN-5351, | Article |
| | which contains a transgene cassette | |
| | to express ROR1-specific CAR + | |
| | mbIL-15 + HER1t plus a PD1 | |
| | silencer module. | |

[0794] The PD1 Silencer Module is designed to produce two mature guide miRNAs that bind to the PD1 transcript to silence PD1 expression. Expression of the two PD1-targeting guide miRNAs, referred to as PD1_1843 and PD1_2061, was confirmed in miRNA expressing ROR1 UltraCAR-T cells generated from multiple donors (FIG. 10A). A corresponding reduction in PD1 mRNA expression was verified in the miRNA-expressing ROR1 UltraCAR-T cells from all donors tested (FIG. 10B). This result demonstrated that the PD1 Silencer module produces the intended guide miRNAs and functions as designed.

[0795] To reduce the risk of silencing genes other than PD1, the PD1 silencer module was designed using pri-miRNA scaffolds that preferentially produce PD1-targeting guide miRNA over the non-targeting passenger miRNA. Both guide and passenger mature miRNAs were quantified from miRNA expressing ROR1 UltraCAR-T cells by RT-qPCR, which verified PD1 targeting guide miRNAs as the predominant species compared to non-targeting passenger strand miRNA (FIG. 4). The strong processing preference for the PD1 targeted guide miRNA was confirmed by small RNAseq, with 99.7% of reads mapping to the PD1 Silencer Module matching the intended PD1 targeting guide miRNAs (FIGS. 12 A-E). Furthermore, the start and stop position of the miRNAs was as expected, with miRNAs of 21-23 nucleotides detected that had the same 5′ end and variable length at the 3′ end (FIGS. 12 A-E). The extremely low incidence of passenger strand miRNAs and lack of unexpected small RNAs generated by aberrant RNA processing substantially reduced the risk for off-target gene silencing.

[0796] To ensure that expression of the PD1 Silencer module does not overwhelm the internal cellular RNAi machinery, endogenous miRNA counts were compared from miRNA expressing ROR1 UltraCAR-T cells vs control ROR1 UltraCAR-T cells. Examination of the top twenty expressed endogenous miRNAs demonstrated no statistically significant changes in expression across the samples (Table 15). Furthermore, the mature miRNAs generated from the PD1 silencer module accounted for approximately 4% of all quantified small RNAs (FIG. 13). The data indicated that expression of miRNAs from the PD1 silencer module did not saturate the cellular RNAi machinery and had no detectable impact on global endogenous miRNA expression.

TABLE 14
Small RNAseq Comparison of Guide and Passenger miRNA Counts

| | Normalized | |
|---|---|---|
| Mature miRNA_Length (Sequence) | Mean | % Total |
| Guide PD1_204_21nt (TTCAGGAATGGGTTCCAAGGA; SEQ | 486,432.3 | 88.2% |
| ID NO: 704) | | |
| Guide PD1_204_22nt (TTCAGGAATGGGTTCCAAGGAT; | 12,763.5 | |
| SEQ ID NO: 72) | | |
| Guide PD1_204_23nt (TTCAGGAATGGGTTCCAAGGATG; | 59,759.4 | |
| SEQ ID NO: 705) | | |
| Passenger PD1_204_21nt (TCCTGGAAGCTATTCCTGACG; | 380.6 | 0.1% |
| SEQ ID NO: 706) | | |
| Passenger PD1_204_22nt (TCCTGGAAGCTATTCCTGACGT; | 20.2 | |
| SEQ ID NO: 707) | | |
| Passenger PD1_204_23nt | 54.7 | |
| (TCCTGGAAGCTATTCCTGACGTT; SEQ ID NO: 708) | | |
| Guide PD1_206_21nt (TATAATATAATAGAACCACAG; SEQ | 3,752.7 | 11.5% |
| ID NO: 709) | | |
| Guide PD1_206_22nt (TATAATATAATAGAACCACAGG; | 49,181.3 | |
| SEQ ID NO: 74) | | |
| Guide PD1_206_23nt (TATAATATAATAGAACCACAGGA; | 19,695.3 | |
| SEQ ID NO: 710) | | |
| Passenger PD1_206_21nt (TGTGGTTCTGTTATATCCATA; | 1,581.0 | 0.3% |
| SEQ ID NO: 711) | | |
| Passenger PD1_206_22nt (TGTGGTTCTGTTATATCCATAT; | 3.1 | |
| SEQ ID NO: 712) | | |
| Passenger PD1_206_23nt | 13.2 | |
| (TGTGGTTCTGTTATATCCATATA; SEQ ID NO: 713) | | |

TABLE 15
Top 20 Expressed Endogenous Mature
miRNAs Detected by Small RNAseq

| | | Log2 Fold | P-value |
|---|---|---|---|
| Endogenous miRNA | Base Mean | Change | Adjusted |
| hsa-miR-181a-5p | 796180.25 | 0.11 | 0.7948 |
| hsa-miR-191-5p | 421094.34 | −0.19 | 0.5622 |
| hsa-miR-21-5p | 386727.78 | 0.03 | 0.9411 |
| hsa-miR-92a-3p | 368149.34 | 0.26 | 0.2298 |
| hsa-miR-142-5p | 345451.62 | 0.08 | 0.8549 |
| hsa-miR-146b-5p | 286127.09 | 0.24 | 0.5471 |
| hsa-miR-16-5p | 261883.66 | 0.00 | 0.9954 |
| hsa-miR-146a-5p | 229059.23 | −0.27 | 0.4569 |
| hsa-let-7f-5p | 188491.61 | 0.16 | 0.6018 |
| hsa-miR-22-3p | 123453.58 | −0.01 | 0.9899 |
| hsa-miR-26a-5p | 110714.77 | 0.19 | 0.5166 |
| hsa-let-7a-5p | 104253.31 | 0.00 | 0.9921 |
| hsa-miR-155-5p | 72533.08 | −0.29 | 0.2298 |
| hsa-miR-181b-5p | 67527.35 | 0.12 | 0.7687 |
| hsa-let-7i-5p | 64631.72 | 0.30 | 0.2116 |
| hsa-miR-21-3p | 52519.27 | 0.25 | 0.5358 |
| hsa-miR-186-5p | 52479.56 | −0.20 | 0.4189 |
| hsa-miR-25-3p | 50411.16 | 0.02 | 0.9696 |
| hsa-miR-27a-3p | 47911.68 | −0.10 | 0.7818 |
| hsa-let-7g-5p | 47159.42 | 0.01 | 0.9811 |

### Example 10: PD1 Silencer Module Specifically Reduces Expression of PD-1

[0797] An in silico miRNA target prediction algorithm, miRanda (Betel et al, 2008; Betel et al, 2010), was used to predict the most likely target transcripts for the guide and passenger miRNAs generated from the PD1 silencer module. The algorithm assigned a score for each potential miRNA target gene, with higher scores indicating higher likelihood of silencing by the input miRNA sequence. A summary of the top ten hits for each mature miRNA generated from the PD1 silencing module is listed in Table 16. PD1 is the only gene with perfect homology to any of the guide and passenger miRNAs and has the highest predicted miRanda score of any potential target gene. Expression of each predicted target gene was characterized from the RNAseq differential expression data set. PD1 was the most downregulated of all predicted target genes, with a log2 fold change (LFC) of −2.63 (˜84% PD1 reduction in miRNA expressing ROR1 UltraCAR-T cells compared to control ROR1 CAR-T cells) and a highly significant adjusted p-value. The expression of other predicted target genes was unchanged; those genes with adjusted p-values below 0.05 had LFC in the range of −0.33 to 0.22, which is an expression decrease or increase of <20%. One exception is a weakly predicted target gene of PD1_2061 guide miRNA, HDAC9, which has a LFC of ˜1.51. HDAC9 is a transcriptional repressor that is mechanistically linked to PD1 expression through BCL6 (Xie et al, 2017; Gil et al, 2016). It is likely that HDAC9 is not directly targeted by PD1_2061 guide miRNA, and that the reduction in HDAC9 is an indirect effect of reduced PD1 expression.

TABLE 16
In silico Predicted miRNA Target Genes

| | | | free | % | Base | | | | |
|---|---|---|---|---|---|---|---|---|---|
| | Target | miRanda | energy | Identity | Mean | log2 | | | Adjusted |
| miRNA | Gene | Score | kcal/mol | to Target | Count | FoldChange | lfcSE | P value | P Value |
| PD1_1843 | PD1 | 200 | −41.9 | 100.0 | 84 | −2.63 | 0.293 | 2.51E−19 | 2.64E−16 |
| miR204 | MIER3 | 184 | −32.1 | 84.2 | 1073 | 0.01 | 0.063 | 0.9104 | 0.9688 |
| Guide | SLFN12L | 182 | −34.2 | 89.5 | 1404 | −0.22 | 0.068 | 0.0015 | 0.0134 |
| miRNA | FMO4 | 180 | −28.5 | 84.2 | 15 | −0.18 | 0.461 | 0.6975 | NA |
| | GIGYF1 | 180 | −33.5 | 84.2 | 2749 | −0.07 | 0.046 | 0.1123 | 0.3211 |
| | FAM83G | 180 | −31.5 | 84.2 | 171 | 0.33 | 0.144 | 0.0214 | 0.1026 |
| | PPRC1 | 180 | −31.2 | 84.2 | 2679 | −0.18 | 0.045 | 0.0001 | 0.0011 |
| | PRMT9 | 180 | −29.1 | 84.2 | 335 | 0.09 | 0.100 | 0.3704 | 0.6432 |
| | MGAT4B | 179 | −29.3 | 88.9 | 4480 | −0.21 | 0.063 | 0.0007 | 0.0076 |
| | BRWD1 | 179 | −25.0 | 88.9 | 1816 | 0.05 | 0.052 | 0.3581 | 0.6328 |
| PD1_1843 | DOCK9 | 179 | −28.5 | 83.3 | 1239 | −0.12 | 0.077 | 0.1240 | 0.3428 |
| miR204 | NFYA | 179 | −27.5 | 83.3 | 1615 | −0.02 | 0.052 | 0.7446 | 0.8911 |
| Passenger | IFIT5 | 178 | −30.4 | 89.5 | 379 | −0.11 | 0.102 | 0.2629 | 0.5351 |
| miRNA | OTUB2 | 178 | −33.7 | 84.2 | 248 | −0.32 | 0.131 | 0.0154 | 0.0805 |
| | UBIAD1 | 177 | −32.1 | 88.9 | 1064 | −0.07 | 0.066 | 0.3085 | 0.5859 |
| | MYO15A | 176 | −29.5 | 93.3 | 11 | −0.25 | 0.510 | 0.6263 | NA |
| | ADRB2 | 175 | −27.1 | 83.3 | 62 | 0.61 | 0.264 | 0.0206 | 0.0997 |
| | HIC2 | 175 | −28.5 | 83.3 | 312 | −0.01 | 0.102 | 0.8962 | 0.9621 |
| | NECTIN3 | 175 | −33.5 | 72.2 | 662 | 0.05 | 0.081 | 0.5587 | 0.7864 |
| | TBC1D10C | 175 | −27.3 | 77.8 | 7562 | 0.03 | 0.041 | 0.4409 | 0.7056 |
| PD1_2061 | PD1 | 200 | −34.3 | 100.0 | 84 | −2.63 | 0.293 | 2.51E−19 | 2.64E−16 |
| miR206 | LCOR | 180 | −16.7 | 84.2 | 1321 | −0.19 | 0.064 | 0.0029 | 0.0230 |
| Guide | STARD4 | 179 | −16.7 | 88.9 | 6871 | −0.18 | 0.055 | 0.0013 | 0.0120 |
| miRNA | UQCRC2 | 179 | −19.1 | 81.0 | 4759 | 0.03 | 0.043 | 0.4641 | 0.7216 |
| | EXD2 | 178 | −17.5 | 88.2 | 58 | 0.18 | 0.265 | 0.5055 | 0.7511 |
| | NOL8 | 177 | −18.6 | 88.9 | 2190 | −0.08 | 0.050 | 0.1007 | 0.2996 |
| | ATP23 | 176 | −18.6 | 84.2 | 318 | 0.22 | 0.100 | 0.0265 | 0.1201 |
| | ELAPOR2 | 176 | −20.6 | 84.2 | 70 | −0.08 | 0.211 | 0.7139 | 0.8793 |
| | HDAC9 | 176 | −19.5 | 84.2 | 73 | −1.51 | 0.280 | 6.77E−08 | 3.53E−06 |
| | WDR47 | 176 | −19.6 | 79.0 | 625 | 0.08 | 0.089 | 0.3892 | 0.6617 |
| PD1_2061 | COG2 | 172 | −18.9 | 93.3 | 1244 | 0.06 | 0.060 | 0.3399 | 0.6170 |
| miR206 | NRG4 | 171 | −25.6 | 77.8 | | | | | |
| Passenger | AGBL3 | 170 | −19.2 | 79.0 | 49 | 0.01 | 0.250 | 0.9811 | 0.9934 |
| miRNA | PDK3 | 170 | −20.9 | 100.0 | 605 | 0.18 | 0.081 | 0.0256 | 0.1169 |
| | PDXK | 170 | −21.7 | 82.4 | 1786 | 0.22 | 0.058 | 0.0002 | 0.0022 |
| | N4BP2 | 169 | −25.1 | 77.8 | 2834 | −0.33 | 0.051 | 1.86E−10 | 1.95E−08 |
| | ZNF271P | 169 | −23.8 | 83.3 | 777 | 0.03 | 0.074 | 0.7197 | 0.8812 |
| | NFKB1 | 168 | −18.8 | 88.2 | 7889 | −0.11 | 0.039 | 0.0036 | 0.0269 |
| | XYLT1 | 168 | −26.9 | 82.4 | 5281 | 0.08 | 0.051 | 0.1100 | 0.3177 |
| | CNOT6 | 167 | −20.1 | 72.2 | 2030 | −0.24 | 0.052 | 0.0000 | 0.0001 |

[0798] It is expected that changes in PD1 expression will impact expression of other genes in downstream pathways. As expected, analysis of RNAseq data confirmed the differential expression of several genes in miRNA expressing ROR1 UltraCAR-T cells compared to the control ROR1 UltraCAR-T cells (FIGS. 14A and B, Table 17). To elucidate direct versus indirect changes in gene expression, the differential expression (LFC) in miRNA expressing ROR1 UltraCAR-T cells compared to control ROR1 CAR-T cells was plotted against the predicted binding potential (predicted free energy) of the PD1 miRNAs for genes, which were in silico predicted as potential PD1 miRNA targets (FIGS. 15A-D). Genes with a highly negative free energy and a statistically significant reduction in expression are likely to be directly targeted by miRNA, while downregulated genes with a weak free energy are likely to be indirectly impacted by the miRNAs. PD1 is clearly separated from all other genes in the plots with a strong reduction in expression and high miRNA binding potential, which suggests a strong and preferential direct targeting of PD1, but not other genes, by the PD1 silencer miRNAs.

TABLE 17
Top 10 Down- and Up-Regulated Genes in ROR1 + PD1
Silencer Cells Relative to Control ROR1 UltraCAR-T Cells

| | | base | Log2Fold | | | | |
|---|---|---|---|---|---|---|---|
| Ensembl_ID | Symbol | Mean | Change | lfcSE | stat | pvalue | padj |
| ENSG00000188389 | PDCD1 | 84.2 | −2.6 | 0.3 | −9.0 | 2.51E−19 | 2.64E−16 |
| ENSG00000172020 | GAP43 | 71.6 | −2.2 | 0.4 | −5.7 | 1.37E−08 | 9.21E−07 |
| ENSG00000171951 | SCG2 | 110.5 | −2.2 | 0.4 | −6.1 | 1.13E−09 | 9.89E−08 |
| ENSG00000105974 | CAV1 | 172.3 | −2.1 | 0.5 | −4.2 | 2.93E−05 | 5.78E−04 |
| ENSG00000136193 | SCRN1 | 37.4 | −1.9 | 0.5 | −3.8 | 0.000136 | 1.97E−03 |
| ENSG00000130287 | NCAN | 206.1 | −1.7 | 0.4 | −4.4 | 1.23E−05 | 2.84E−04 |
| ENSG00000156052 | GNAQ | 145.0 | −1.7 | 0.2 | −7.8 | 6.88E−15 | 2.18E−12 |
| ENSG00000135898 | GPR55 | 84.5 | −1.6 | 0.3 | −5.7 | 1.47E−08 | 9.48E−07 |
| ENSG00000152495 | CAMK4 | 856.5 | −1.6 | 0.2 | −7.5 | 9.08E−14 | 2.21E−11 |
| ENSG00000102271 | KLHL4 | 184.3 | −1.6 | 0.3 | −4.7 | 3.00E−06 | 8.90E−05 |
| ENSG00000165025 | SYK | 120.2 | 1.6 | 0.4 | 4.0 | 6.65E−05 | 1.10E−03 |
| ENSG00000276597 | TRBV11-3 | 123.1 | 1.6 | 0.6 | 2.7 | 0.006913 | 4.44E−02 |
| ENSG00000082781 | ITGB5 | 329.1 | 1.7 | 0.3 | 5.7 | 1.45E−08 | 9.44E−07 |
| ENSG00000244242 | IFITM10 | 555.8 | 1.7 | 0.2 | 7.6 | 4.18E−14 | 1.10E−11 |
| ENSG00000143842 | SOX13 | 116.9 | 1.7 | 0.2 | 7.6 | 3.87E−14 | 1.06E−11 |
| ENSG00000180549 | FUT7 | 318.7 | 1.7 | 0.4 | 4.3 | 1.71E−05 | 3.71E−04 |
| ENSG00000137474 | MYO7A | 1057.3 | 1.8 | 0.2 | 8.2 | 3.56E−16 | 1.62E−13 |
| ENSG00000177508 | IRX3 | 317.9 | 1.8 | 0.5 | 3.3 | 0.001046 | 1.03E−02 |
| ENSG00000136689 | IL1RN | 242.1 | 1.9 | 0.5 | 4.0 | 5.65E−05 | 9.70E−04 |
| ENSG00000189013 | KIR2DL4 | 800.0 | 1.9 | 0.3 | 6.4 | 1.51E−10 | 1.62E−08 |

### Example 11

[0799] In one instance a patient is diagnosed with a particular cancer. In this example the patient is diagnosed with breast cancer. The patient is identified to receive a particular chimeric antigen receptor therapy. The patient provides an initial blood sample for isolation of the desired cell type. In this example, the isolated cell type is a T-cell. In this example only a portion of the isolated T-cells are transfected with the desired initial CAR selected from the collection of CARs. The remaining T-cells are coded and stored in appropriate condition for potential future use by the patient. The remaining T-cells are transfected through an appropriate means. In this example, the transfection occurs through a non-viral means. In particular, the non-viral means utilizes a single sleeping beauty vector that encodes for at least the selected CAR, a T-cell expansion cytokine, and a termination switch. The patient is treated within 48 hours from the initial T-cell isolation.

[0800] Once the above round of treatment is complete the patient is followed in accordance with monitoring protocols. In the event there is an expansion of the cancer, in this example breast cancer, the patient is reevaluated. The patient may be redosed with the initial CAR, however, in the event the evaluation demonstrates that after the initial or potential redose there is antigen escape the protocol will call for a dosing of a new CAR from the CAR collection. In this instance, the patient's stored T-cells will be selected for use in the transfection of the newly selected CAR. The patient will be able to be redosed in a timely fashion. Further as the patient has already received each portion of the follow-on therapy except the newly selected CAR, the risk of toxicities and or adverse events is reduced. Further the knowledge of previous T-cell expansion for this patient is informed by the levels of expansion from the initial CAR selection. This further allows for a potential change in the dosage size, be it greater or less than the initial dose.

### Example 12

[0801] In one instance a patient is not diagnosed with a particular cancer, but rather a specific antigen has been identified as causing undesired proliferation of cells or expansion of an infective agent. The initial CAR is selected based on antigen being presented in the patient. The patient provides an initial blood sample for isolation of the desired cell type. In this example, the isolated cell type is a T-cell. In this example all of the isolated T-cells are transfected with the desired initial CAR selected from the collection of CARs. The T-cells are transfected through an appropriate means. In this example, the transfection occurs through a non-viral means. In particular, the non-viral means utilizes a single sleeping beauty vector that encodes for at least the selected CAR, a T-cell expansion cytokine, and a kill switch. The patient is treated within 48 hours from the initial T-cell isolation.

[0802] Once the above round of treatment is complete the patient is followed in accordance with monitoring protocols. Following further evaluation the patient demonstrates that there is antigen escape. The patient is then dosed with a new CAR from the CAR collection following collection of new T-cells. Further as the patient has already received each portion of the follow-on therapy except the newly selected CAR, the risk of toxicities and or adverse events is reduced. Further the knowledge of previous T-cell expansion for this patient is informed by the levels of expansion from the initial CAR selection. This further allows for a potential change in the dosage size, be it greater or less than the initial dose.

### Example 13

[0803] The clinician develops a treatment plan for a patient that involves use of an initial CAR from the CAR collection. The treatment plan includes a dosing of different CARs from the collection in consecutive manner to prevent antigen escape.

### Example 14

[0804] In one instance a patient is diagnosed with a particular cancer. In this example the patient is diagnosed with pancreatic cancer. The patient is identified to receive a particular chimeric antigen receptor therapy. The patient provides an initial blood sample for isolation of the desired cell type. In this example, the isolated cell type is a T-cell. In this example the isolated T-cell's are transfected with the desired initial CAR selected from the collection of CARs. The T-cells are transfected through a non-viral means utilizing a single sleeping beauty vector that encodes for at least the selected CAR, a T-cell expansion cytokine, and a kill switch. The patient is treated within 48 hours from the initial T-cell isolation.

[0805] Once the above round of treatment is complete the patient is followed in accordance with monitoring protocols. In this instance, the patient through reevaluation is noted to suffer antigen escape. In this instance the patient requires dosing with a new CAR. However, due to the condition of the patient a sufficient sample of autologous T-cell may not be obtained. As a result the method allows for the inclusion of allogenic T-cells to be incorporated to the therapy. The CAR from the library is transduced into the allogenic T-cells and the patient is dosed in a timely fashion. Further as the patient has already received each portion of the follow-on therapy, the risk of toxicities and or adverse events is reduced.

### Example 15

[0806] In one instance a patient is not diagnosed with a particular cancer, but rather a specific antigen has been identified as causing undesired proliferation of cells or expansion of an infective agent. The initial CAR is selected based on antigen being presented in the patient. The patient is unable to provide an initial blood sample for isolation of the desired cell type due to the current health of the patient. As such, allogenic T-cells are transfected with the desired initial CAR selected from the collection of CARs. The T-cells are transfected through an appropriate means utilizing a single attsite vector that encodes for at least the selected CAR, a T-cell expansion cytokine, and a termination switch.

[0807] Once the above round of treatment is complete the patient is followed in accordance with monitoring protocols. Following further evaluation the patient demonstrates that there is antigen escape. The patient is then dosed with a new CAR using the same source of allogenic T-cells. Further as the patient has already received each portion of the follow-on therapy except the newly selected CAR, the risk of toxicities and or adverse events is reduced. Further the knowledge of previous T-cell expansion for this patient is informed by the levels of expansion from the initial CAR selection. This further allows for a potential change in the dosage size, be it greater or less than the initial dose.

### Example 16

[0808] The clinician develops a treatment plan for a patient that involves use of an initial CAR from the CAR collection. The treatment plan includes a dosing of different CARs from the collection in consecutive manner to prevent antigen escape. This treatment plan may include the use of both autologous and allogenic cells.

### Example 17

[0809] In one instance a patient is diagnosed with a specific antigen has been identified as causing undesired proliferation of cells or expansion of an infective agent. The initial CAR is selected based on antigen being presented in the patient. The patient is unable to provide an initial blood sample for isolation of the desired cell type due to the current health of the patient. As such, allogenic cells are transfected with the desired initial CAR selected from the collection of CARs. The cells are transfected through an appropriate means utilizing a single sleeping beauty vector that encodes for at least the selected CAR and a termination switch.

[0810] Once the above round of treatment is complete the patient is followed in accordance with monitoring protocols. Following further evaluation the patient demonstrates that there is antigen escape. The patient is then dosed with a new CAR using a source of allogenic T-cells or if the patient show sufficient improvement autologous T-cells.

### Example 18

[0811] In one instance a patient is not diagnosed with a particular cancer, but rather a specific antigen has been identified as causing undesired proliferation of cells or expansion of an infective agent. The initial CAR is selected based on antigen being presented in the patient. The patient provides an initial blood sample for isolation of T-cells. The T-cells are transfected with the desired initial CAR selected from the collection of CARs utilizing a single sleeping beauty vector that encodes for the selected CAR, a T-cell expansion cytokine, and a kill switch. The patient is treated within 48 hours from the initial T-cell isolation.

[0812] Once the above round of treatment is complete the patient is followed in accordance with monitoring protocols. Following further evaluation the patient demonstrates that there is antigen escape. The patient is then dosed with the same CAR and a new CAR from the CAR collection.

### Example 19

[0813] In one instance a patient is diagnosed with a particular cancer. In this example the patient is diagnosed with AML. The patient is identified to receive a particular chimeric antigen receptor therapy. The patient provides an initial blood sample for isolation of the desired cell type. The cells are transfected with the desired two different CARs selected from the collection of CARs. The cells are transfected through a non-viral means utilizing a single vector that encodes for both selected CARs and a kill switch.

[0814] Once the above round of treatment is complete the patient is followed in accordance with monitoring protocols. In this instance, the patient through reevaluation is noted to suffer antigen escape. In this instance the patient requires dosing with a new CAR. However, due to the condition of the patient a sufficient sample of autologous cell may not be obtained. As a result the method allows for the inclusion of allogenic T-cells to be incorporated to the therapy. The CAR from the library is transduced into the allogenic cells and the patient is dosed in a timely fashion.

Nucleic Acid Sequences Encoding Backbone miRNA Sequences

| Synthetic | DNA encoding 5′ | DNA encoding stem | DNA encoding 3′ |
|---|---|---|---|
| miRNA | backbone sequence | loop | backbone sequence |
| miR204 | AGGAGGGTGGGGGTGG | GAGAATATATGAAGG | GTTCAATTGTCATCACTG |
| | AGGCAAGCAGAGGACTT | (SEQ ID NO: 2) | GCATCTTTTTTGATCATTG |
| | CCTGATCGCGTACCCATG | | CACCATCATCAAATGCAT |
| | GCTACAGTCTTTCTTCATG | | TGGGATAACCATGAC |
| | TGACTCGTGGAC | | (SEQ ID NO: 3) |
| | (SEQ ID NO: 1) | | |
| miR206 | GATGCTACAAGTGGCCCA | TATGGATTACTTTGCTA | TTTCGGCAAGTGCCTCCT |
| | CTTCTGAGATGCGGGCTG | (SEQ ID NO: 5) | CGCTGGCCCCAGGGTACC |
| | CTTCTGGATGACACTGCT | | ACCCGGAGCACAGGTTTG |
| | TCCCGAGG | | GTGACCTT |
| | (SEQ ID NO: 4) | | (SEQ ID NO: 6) |
| miR17 | TTAGCAGGAAAAAAGAG | TGATATGTGCAT | GCATTATGGTGACAGCTG |
| | AACATCACCTTGTAAAAC | (SEQ ID NO: 8) | CCTCGGGAAGCCAAGTTG |
| | TGAAGATTGTGACCAGTC | | GGCTTTAAAGTGCAGGG |
| | AGAATAATGT | | CCTGCTGATGT |
| | (SEQ ID NO: 7) | | (SEQ ID NO: 9) |
| miR150 | AGGGACTGGGCCCACGG | CTGGGCTCAG | CAGGGACCTGGGGACCC |
| | GGAGGCAGCGTCCCCGA | (SEQ ID NO: 11) | CGGCACCGGCAGGCCCC |
| | GGCAGCAGCGGCAGCGG | | AAGGGGTGAGGTGAGCG |
| | CGGCTCCTCTCCCCATGG | | GGCATTGGGACCTCCCCT |
| | CCCTG | | CCCTGTACTC |
| | (SEQ ID NO: 10) | | (SEQ ID NO: 12) |
| miR150 | AGGGACTGGGCCCACGG | TGCTGGGCTCAGACC | GGACCTGGGGACCCCGG |
| | GGAGGCAGCGTCCCCGA | (SEQ ID NO: 14) | CACCGGCAGGCCCCAAG |
| | GGCAGCAGCGGCAGCGG | | GGGTGAGGTGAGCGGGC |
| | CGGCTCCTCTCCCCATGG | | ATTGGGACCTCCCCTCCC |
| | CC | | TGTACTC |
| | (SEQ ID NO: 13) | | (SEQ ID NO: 15) |
| miR16 | CTTCTGAAGAAAATATAT | TTAAGATTCTAAAATTATC | AAGTAAGGTTGACCATAC |
| | TTCTTTTTATTCATAGCTC | T | TCTACAGTTGTGTTTTAAT |
| | TTATGATAGCAATGTCAG | (SEQ ID NO: 17) | GTATATTAATGTTACTAAT |
| | CAGTGCCT | | GTGTTTT |
| | (SEQ ID NO: 16) | | (SEQ ID NO: 18) |
| miR30a | CAGGTTAACCCAACAGAA | CTGTGAAGCCACAGATG | TGCCTACTGCCTCGGACT |
| | GGCTAAAGAAGGTATATT | GG | TCAAGGGGCTACTTTAGG |
| | GCTGTTGACAGTGAGCG | (SEQ ID NO: 20) | AGCAATTATCTTGTTTA |
| | AC | | (SEQ ID NO: 21) |
| | (SEQ ID NO: 19) | | |
| miR126 | CCGGGGTCCTGTCTGCAT | CTGTGACACTTCAAAC | CCGTCCACGGCACCGCAT |
| | CCAGCGCAGCATTCTGGA | (SEQ ID NO: 23) | CGAAAACGCCGCTGAGA |
| | AGACGCCACGCCTCCGCT | | CCTCAGCCTTGACCTCCCT |
| | GGCGACGG | | CAGCGTGG |
| | (SEQ ID NO: 22) | | (SEQ ID NO: 24) |
| miR122 | CAATGGTGGAATGTGGA | TGTCTAAACTAT | TAGCTACTGCTAGGCAAT |
| | GGTGAAGTTAACACCTTC | (SEQ ID NO: 26) | CCTTCCCTCGATAAATGTC |
| | GTGGCTACAGAGTTTCCT | | TTGGCATCGTTTGCTTTG |
| | TAGCAGAGCTG | | AGCAAGAAGGTTCATCTG |
| | (SEQ ID NO: 25) | | ATATCAGTCTTCTCAATCT |
| | | | (SEQ ID NO: 27) |
| miR214 | ACAGGCTGATTGTATCTG | GCAGAACATCCGCTCACC | CACATGACAACCCAGCCT |
| | TCTATGAGCAAAGGAAAC | TGT | GAATGACAACCAGCCATT |
| | CTGAAGGAACCAAGGGC | (SEQ ID NO: 29) | GAAAGAAAGCAGCCCTC |
| | CTGGCTGGACAGAGTTGT | | ACACCATAGCATCTA |
| | CATGTG | | (SEQ ID NO: 30) |
| | (SEQ ID NO: 28) | | |
| miR214 | ACAGGCTGATTGTATCTG | AGAACATCCGCTCACCT | CACATGACAACCCAGCCT |
| | TCTATGAGCAAAGGAAAC | (SEQ ID NO: 32) | GAATGACAACCAGCCATT |
| | CTGAAGGAACCAAGGGC | | GAAAGAAAGCAGCCCTC |
| | CTGGCTGGACAGAGTTGT | | ACACCATAGCATCTA |
| | CATGTGTC | | (SEQ ID NO: 33) |
| | (SEQ ID NO: 31) | | |
| miR29b1 | GGGTTTATTGTAAGAGAG | GATTTAAATAGTGATTGT | CTTGGGGGAGACCAGCT |
| | CATTATGAAGAAAAAAAT | C | GCGCTGCACTACCAACAG |
| | AGATCATAAAGCTTCTTC | (SEQ ID NO: 35) | CAAAAGAAGTGAATGGG |
| | AGG | | ACAGCT |
| | (SEQ ID NO: 34) | | (SEQ ID NO: 36) |
| miR29b1 | GGGTTTATTGTAAGAGAG | TTTAAATAGTGATTG | GTTCTTGGGGGAGACCA |
| | CATTATGAAGAAAAAAAT | (SEQ ID NO: 38) | GCTGCGCTGCACTACCAA |
| | AGATCATAAAGCTTCTTC | | CAGCAAAAGAAGTGAAT |
| | AGGAA | | GGGACAGCT |
| | (SEQ ID NO: 37) | | (SEQ ID NO: 39) |
| miR133a1 | TTTACCAATGAAAAGCAT | TCGCCTCTTCAATGGA | TAGCTATGCATTGATTAC |
| | TTAACTGTTTTGGATTCCA | (SEQ ID NO: 41) | TACGGGACAACCAACGTT |
| | AACTAGCAGCACTACAAT | | TTCATTTGTGAATATCAAT |
| | GCTTTGCTA | | TACTTGCCA |
| | (SEQ ID NO: 40) | | (SEQ ID NO: 42) |
| miR26a | TGAAGCCACAGGAGCCA | GTGCAGGTCCCAATG | CGGGGACGCGGGCCTGG |
| | AGAGCAGGAGGACCAAG | (SEQ ID NO: 44) | ACGCCGGCATCCGGGCTC |
| | GCCCTGGCGAAGGCCGT | | AGGACCCCCCTCTCTGCC |
| | GGCCTCG | | AGAGGC |
| | (SEQ ID NO: 43) | | (SEQ ID NO: 45) |
| miR412 | GTCTTGGAGGCTGGGGC | GTTTCT | GCCGTCCGTATCCGCTGC |
| | ACCTCGGGGAAGGACGC | (SEQ ID NO: 47) | AGCCTGTGGGGCCTGCG |
| | CGGCATCAGCACCATTCT | | GGCCGGGGAGCCGATCG |
| | GGGGTACGGGGATGGA | | CGCTTCAGCTCAGCGCCT |
| | (SEQ ID NO: 46) | | (SEQ ID NO: 48) |
| miR-19 | CCAATAATTCAAGCCAAG | TACAAGAAGAATGTAGT | TGGTGGCCTGCTATTTCC |
| | CAAGTATATAGGTGTTTT | (SEQ ID NO: 50) | TTCAAATGAATGATTTTTA |
| | AATAGTTTTTGTTTGCAGT | | CTAATTTTGTGTACTTTTA |
| | CCTCTG | | TTGTG |
| | (SEQ ID NO: 49) | | (SEQ ID NO: 51) |
| miR-21 | TGTCTGCTTGTTTTGCCTA | CTGTTGAATCTCATGG | TCTGACATTTTGGTATCTT |
| | CCATCGTGACATCTCCAT | (SEQ ID NO: 53) | TCATCTGACCATCCATATC |
| | GGCTGTACCACCTTGTCG | | CAATGTTCTCATTTAAACA |
| | GG | | (SEQ ID NO: 54) |
| | (SEQ ID NO: 52) | | |
| miR-142 | GGAGTCAGGAGGCCTGG | AACAGCACTGGAGGG | GATGAGTGTACTGTGGG |
| | GCAGCCTGAAGAGTACA | (SEQ ID NO: 56) | CTTCGGAGATCACGCCAC |
| | CGCCGACGGACAGACAG | | TGCTGCCGCCCGCTGCCC |
| | ACAGTGCAGTCACC | | GCCACCATCTTC |
| | (SEQ ID NO: 55) | | (SEQ ID NO: 57) |
| miR-494 | CAGTTCTGTTTTGATTTTT | TCTTTATTTATGA | TTTTTTAGTATCAAATCCC |
| | TTTGTTTGTTTTTTGATCA | (SEQ ID NO: 59) | ACCCTGGAGGCACTTCCT |
| | GTGCTAATCTTCGATACT | | GTTCCTGATGCAGCCTTC |
| | CGAAGGA | | AGGGAGG |
| | (SEQ ID NO: 58) | | (SEQ ID NO: 60) |
| miR-1915 | CGGACCACGGTGTCCCCT | GTGCACCCGTG | GCGGCCCTAGCGACCTGC |
| | TCTCTCCAGCTGGGGGTC | (SEQ ID NO: 62) | GGCGGCGCCGGGAAAGC |
| | TCGGGTCCTGGCGCTGAG | | CCTGCCTCTGCAGCGGGT |
| | AGGCCGC | | CCCAGGGGTC |
| | (SEQ ID NO: 61) | | (SEQ ID NO: 63) |

Nucleic acid sequences encoding mature miRNA sequences

| miRNA | | | DNA encoding passenger |
|---|---|---|---|
| Target | Backbone | DNA encoding guide miRNA | miRNA |
| CTLA4 | miR-204 | AATATAGTCTTCTCCCTCGCTT | AAGCAGGGACAGGACTATATT |
| | | (SEQ ID NO: 64) | (SEQ ID NO: 65) |
| CTLA4 | miR-26a | AATATAGTCTTCTCCCTCGCTT | GAGCGAGGGATAGGACTATACT |
| | | (SEQ ID NO: 66) | (SEQ ID NO: 67) |
| CTLA4 | miR-30a | AATATAGTCTTCTCCCTCGCTG | CAGTGAGGGAAGACTATGTT |
| | | (SEQ ID NO: 68) | (SEQ ID NO: 69) |
| CTLA4 | miR-206 | AATATAGTCTTCTCCCTCGCTG | CAGCGAGGGAGAAGATTAC |
| | | (SEQ ID NO: 70) | CATT |
| | | | (SEQ ID NO: 71) |
| PD1 | miR-204 | TTCAGGAATGGGTTCCAAGGAT | ATCCTGGAAGCTATTCCTGAC |
| | | (SEQ ID NO: 72) | (SEQ ID NO: 73) |
| PD1 | miR-206 | TATAATATAATAGAACCACAGG | CCTGTGGTTCTGTTATATCCA |
| | | (SEQ ID NO: 74) | TA |
| | | | (SEQ ID NO: 75) |
| PD1 | miR-30a | TTCAGGAATGGGTTCCAAGGAG | CTCCTTGGACCATTCCTGAA |
| | | (SEQ ID NO: 76) | (SEQ ID NO: 77) |
| PD1 | miR-412 | TTCAGGAATGGGTTCCAAGGAATT | AATGTCCTGAAGCCATTCAT |
| | | (SEQ ID NO: 78) | GGA |
| | | | (SEQ ID NO: 79) |
| PD1 | miR122 | TTCAGGAATGGGTTCCAAGGAG | CTCCTTGGAACACATTCCTAC |
| | | (SEQ ID NO: 80) | A |
| | | | (SEQ ID NO: 81) |
| PD1 | miR-17 | TTCAGGAATGGGTTCCAAGGAAG | CTTCTTGGTACACGTTCCTGC |
| | | (SEQ ID NO: 82) | TCA |
| | | | (SEQ ID NO: 83) |
| PD1 | miR-150 | TATAATATAATAGAACCACAGG | ACGTGTGGTTTATCCTGTTGT |
| | | (SEQ ID NO: 74) | A |
| | | | (SEQ ID NO: 85) |
| PD1 | miR-486 | TATAATATAATAGAACCACAGG | CCAGCTTGTGGTTCTATTATG |
| | | (SEQ ID NO: 74) | TTATA |
| | | | (SEQ ID NO: 87) |
| TIGIT | miR-17 | AGATCCACGTTACTCACCCTAG | CTAGGGTGTGTCATGTGGAT |
| | | (SEQ ID NO: 88) | GAA |
| | | | (SEQ ID NO: 89) |
| TIGIT | miR-150 | AGATCCACGTTACTCACCCGTG | ACCCGGGTGATAATATGGAT |
| | | (SEQ ID NO: 90) | CT |
| | | | (SEQ ID NO: 91) |
| TIGIT | miR-204 | AGATCCACGTTACTCACCCCCT | AGGGGTGAGAAGCGTGGAT |
| | | (SEQ ID NO: 92) | CC |
| | | | (SEQ ID NO: 93) |
| TIGIT | miR29b1 | AGATCCACGTTACTCACCCTTA | TAGGTGAGTTACGTGGATCT |
| | | (SEQ ID NO: 94) | GTT |
| | | | (SEQ ID NO: 95) |
| TIGIT | miR214 | AGATCCACGTTACTCACCCTGC | GTAGGGTGAGACTCGTGGA |
| | | (SEQ ID NO: 96) | TCT |
| | | | (SEQ ID NO: 97) |
| TIGIT | miR-206 | ACCACGATGACTGCTGTGCAGA | TCTGCGTAGCAGTCATCGCC |
| | | (SEQ ID NO: 98) | GGT |
| | | | (SEQ ID NO: 99) |
| TIGIT | miR-204 | ACCACGATGACTGCTGTGCAGA | TCTGATGGCCGTCATCGTGGC |
| | | (SEQ ID NO: 100) | (SEQ ID NO: 101) |
| TIGIT | miR-22 | ACCACGATGACTGCTGTGCAGA | TCTGTACAGCAGCATCGATG |
| | | (SEQ ID NO: 102) | GT |
| | | | (SEQ ID NO: 103) |
| TIGIT | miR-16 | ACCACGATGACTGCTGTGCAGA | TGCGCAGCTGTTCATCGTGGT |
| | | (SEQ ID NO: 104) | (SEQ ID NO: 105) |
| TIGIT | miR-21 | ACCACGATGACTGCTGTGCAGA | CTGCGAAGCAGCATCGTGGC |
| | | (SEQ ID NO: 106) | (SEQ ID NO: 107) |
| TIGIT | miR-494 | ACCACGATGACTGCTGTGCAGA | TCTGCAACGCAGTCTCGCTGG |
| | | (SEQ ID NO: 108) | (SEQ ID NO: 109) |
| TIGIT | miR-142 | ACCACGATGACTGCTGTGCAGA | GATGCACAGCAATCATCGTG |
| | | (SEQ ID NO: 110) | GT |
| | | | (SEQ ID NO: 111) |
| TIGIT | miR-19 | ACCACGATGACTGCTGTGCAGAT | ATCTGCACAGCAGTTCGTGG |
| | | (SEQ ID NO: 112) | (SEQ ID NO: 113) |
| TIGIT | miR-1915 | ACCACGATGACTGCTGTGCAGA | TCTGCCAATAGCTGTAATCG |
| | | (SEQ ID NO: 114) | TGG |
| | | | (SEQ ID NO: 115) |
| TIGIT | miR-206 | TATCGTTCACGGTCAGCGACTG | CAGTCGTTGACTGTGGACTT |
| | | (SEQ ID NO: 116) | ATA |
| | | | (SEQ ID NO: 117) |
| TIGIT | miR-204 | TATCGTTCACGGTCAGCGACTG | CAGTGCTGAACGTGAACGATC |
| | | (SEQ ID NO: 118) | (SEQ ID NO: 119) |
| TIGIT | miR-22 | TATCGTTCACGGTCAGCGACTG | TAGTCGCTGACTTGAACAGA |
| | | (SEQ ID NO: 120) | TA |
| | | | (SEQ ID NO: 121) |
| TIGIT | miR-142 | TATCGTTCACGGTCAGCGACT | TGTCGCTGACAGTGAACGATA |
| | | (SEQ ID NO: 122) | (SEQ ID NO: 123) |
| TIGIT | miR-16 | TATCGTTCACGGTCAGCGACTG | GTCGCTGAGCGCTGAACGATG |
| | | (SEQ ID NO: 124) | (SEQ ID NO: 125) |
| TIGIT | miR-206 | TAACTCAGGACATTGAAGTAGT | ACTACTTCAATGTCCTGACCT |
| | | (SEQ ID NO: 126) | TA |
| | | | (SEQ ID NO: 127) |
| TIGIT | miR-204 | TAACTCAGGACATTGAAGTAGT | ACTATTCAGAGTCCTGAGTTC |
| | | (SEQ ID NO: 128) | (SEQ ID NO: 129) |
| TIGIT | miR-21 | TAACTCAGGACATTGAAGTAGT | CTACTCCAATGCCTGAGTTG |
| | | (SEQ ID NO: 130) | (SEQ ID NO: 131) |
| TIGIT | miR-494 | TAACTCAGGACATTGAAGTAGT | ACTACTGTAATGTCTGACGTT |
| | | (SEQ ID NO: 132) | (SEQ ID NO: 133) |
| TIGIT | miR-19 | TAACTCAGGACATTGAAGTAGTC | GACTACTTCAATGTTGAGTT |
| | | (SEQ ID NO: 134) | (SEQ ID NO: 135) |
| TIGIT | miR-1915 | AGATCCACGTTACTCACCCTAG | CTAGGCAGTGAGCAAAGTG |
| | | (SEQ ID NO: 136) | GATC |
| | | | (SEQ ID NO: 137) |
| TIGIT | miR-204 | AGATCCACGTTACTCACCCTAG | CTAGGTGAGAAACGTGGATCG |
| | | (SEQ ID NO: 138) | (SEQ ID NO: 139) |
| TIGIT | miR-206 | AGATCCACGTTACTCACCCTAG | CTAGGGTGAGTAACGTGGCC |
| | | (SEQ ID NO: 140) | TCT |
| | | | (SEQ ID NO: 141) |
| TIGIT | miR-21 | AGATCCACGTTACTCACCCTAG | TAGGGCGAGTACGTGGATCG |
| | | (SEQ ID NO: 142) | (SEQ ID NO: 143) |
| TIGIT | miR-22 | AGATCCACGTTACTCACCCTAG | CTAGGGTGAGTACGTGGCAT |
| | | (SEQ ID NO: 144) | CT |
| | | | (SEQ ID NO: 145) |
| TIM3 | miR204 | CATTATGCCTGGGATTTGGATC | GATCAGATCGCAGGCATAATT |
| | | (SEQ ID NO: 146) | (SEQ ID NO: 147) |
| TIM3 | miR206 | CATTATGCCTGGGATTTGGATC | GATCCGGATCCTAGGTATCC |
| | | (SEQ ID NO: 148) | ATG |
| | | | (SEQ ID NO: 149) |
| TIM3 | miR17 | CATTATGCCTGGGATTTGGATCG | CGGCCAGAACCAAGGCATAA |
| | | (SEQ ID NO: 150) | GTA |
| | | | (SEQ ID NO: 151) |
| TIM3 | miR126 | CATTATGCCTGGGATTTGGATC | ACTCCAAATCCCGTGCATAA |
| | | (SEQ ID NO: 152) | TCG |
| | | | (SEQ ID NO: 153) |
| TIM3 | miR122 | CATTATGCCTGGGATTTGGATC | GATTCGAATCCAAGGCATAT |
| | | (SEQ ID NO: 154) | GG |
| | | | (SEQ ID NO: 155) |
| TIM3 | miR214 | TAATTCACATCCCTTTCATCAG | ATGATGAAAGGACAGTGAA |
| | | (SEQ ID NO: 156) | TTA |
| | | | (SEQ ID NO: 157) |
| LAG3 | miR-30a | TAGTCGTTGGGTAAAGTCGCCA | TGGTGACTTCTCAACGATTA |
| | | (SEQ ID NO: 158) | (SEQ ID NO: 159) |
| LAG3 | miR122 | GTTGCTTTCCGCTAAGTGGTGA | TCACCACTTAGAGGAAAGCC |
| | | (SEQ ID NO: 160) | TC |
| | | | (SEQ ID NO: 161) |
| GITR | miR206 | TTTGCAGTGGCCTTCGTGGCCC | GGGCTATGAAGGCCATTGA |
| | | (SEQ ID NO: 162) | GAAA |
| | | | (SEQ ID NO: 163) |
| GITR | miR29b1 | AGCCTCCCGTCCTAAGACCCCAC | GTGGGTCTTAGGTCGGGAG |
| | | (SEQ ID NO: 164) | CTGCT |
| | | | (SEQ ID NO: 165) |
| PIK3IP1 | miR206 | TGAACGACCAGTGTTTAACCGG | CCGGTTGAACATTGGTTGCC |
| | | (SEQ ID NO: 166) | TCA |
| | | | (SEQ ID NO: 167) |
| PIK3IP1 | miR126 | TTCTCCTTGGAGTTCATCCGCG | ATGAACTTAGAGGAGACG |
| | | (SEQ ID NO: 168) | (SEQ ID NO: 169) |
| PIK3IP1 | miR30a | TTCTCCTTGGAGTTCATCCGCG | CGCGGATGATCCAAGGAGGA |
| | | (SEQ ID NO: 170) | (SEQ ID NO: 171) |

Nucleic acid sequences encoding non-naturally occurring pri-miRNA
sequences

| miRNA | Encoded pri- | |
|---|---|---|
| Target | miRNA(s) | DNA Sequence |
| CTLA4 | miR204 | AGGAGGGTGGGGGTGGAGGCAAGCAGAGGACTTCCTGATCGC |
| | | GTACCCATGGCTACAGTCTTTCTTCATGTGACTCGTGGACAATA |
| | | TAGTCTTCTCCCTCGCTTGAGAATATATGAAGGAAGCAGGGAC |
| | | AGGACTATATTGTTCAATTGTCATCACTGGCATCTTTTTTGATCA |
| | | TTGCACCATCATCAAATGCATTGGGATAACCATGAC |
| | | (SEQ ID NO: 178) |
| PD1 | miR204 | AGGAGGGTGGGGGTGGAGGCAAGCAGAGGACTTCCTGATCGC |
| | | GTACCCATGGCTACAGTCTTTCTTCATGTGACTCGTGGACTTCA |
| | | GGAATGGGTTCCAAGGATGAGAATATATGAAGGATCCTGGAA |
| | | GCTATTCCTGACGTTCAATTGTCATCACTGGCATCTTTTTTGATC |
| | | ATTGCACCATCATCAAATGCATTGGGATAACCATGAC |
| | | (SEQ ID NO: 179) |
| PD1 | miR206 | GATGCTACAAGTGGCCCACTTCTGAGATGCGGGCTGCTTCTGG |
| | | ATGACACTGCTTCCCGAGGCCTGTGGTTCTGTTATATCCATATAT |
| | | GGATTACTTTGCTATATAATATAATAGAACCACAGGTTTCGGCA |
| | | AGTGCCTCCTCGCTGGCCCCAGGGTACCACCCGGAGCACAGGT |
| | | TTGGTGACCTT |
| | | (SEQ ID NO: 180) |
| TIGIT | miR17 | TTAGCAGGAAAAAAGAGAACATCACCTTGTAAAACTGAAGATT |
| | | GTGACCAGTCAGAATAATGTAGATCCACGTTACTCACCCTAGTG |
| | | ATATGTGCATCTAGGGTGTGTCATGTGGATGAAGCATTATGGT |
| | | GACAGCTGCCTCGGGAAGCCAAGTTGGGCTTTAAAGTGCAGGG |
| | | CCTGCTGATGT |
| | | (SEQ ID NO: 181) |
| TIGIT | miR150 | AGGGACTGGGCCCACGGGGAGGCAGCGTCCCCGAGGCAGCAG |
| | | CGGCAGCGGCGGCTCCTCTCCCCATGGCCCTGAGATCCACGTTA |
| | | CTCACCCGTGCTGGGCTCAGACCCGGGTGATAATATGGATCTC |
| | | AGGGACCTGGGGACCCCGGCACCGGCAGGCCCCAAGGGGTGA |
| | | GGTGAGCGGGCATTGGGACCTCCCCTCCCTGTACTC |
| | | (SEQ ID NO: 182) |
| TIGIT | miR204 | AGGAGGGTGGGGGTGGAGGCAAGCAGAGGACTTCCTGATCGC |
| | | GTACCCATGGCTACAGTCTTTCTTCATGTGACTCGTGGACAGAT |
| | | CCACGTTACTCACCCCCTGAGAATATATGAAGGAGGGGTGAGA |
| | | AGCGTGGATCCGTTCAATTGTCATCACTGGCATCTTTTTTGATCA |
| | | TTGCACCATCATCAAATGCATTGGGATAACCATGAC |
| | | (SEQ ID NO: 183) |
| TIGIT | miR-206 | GATGCTACAAGTGGCCCACTTCTGAGATGCGGGCTGCTTCTGG |
| | | ATGACACTGCTTCCCGAGGTCTGCGTAGCAGTCATCGCCGGTTA |
| | | TGGATTACTTTGCTAACCACGATGACTGCTGTGCAGATTTCGGC |
| | | AAGTGCCTCCTCGCTGGCCCCAGGGTACCACCCGGAGCACAGG |
| | | TTTGGTGACCTT |
| | | (SEQ ID NO: 184) |
| TIGIT | miR-204 | AGGAGGGTGGGGGTGGAGGCAAGCAGAGGACTTCCTGATCGC |
| | | GTACCCATGGCTACAGTCTTTCTTCATGTGACTCGTGGACACCA |
| | | CGATGACTGCTGTGCAGAGAGAATATATGAAGGTCTGATGGCC |
| | | GTCATCGTGGCGTTCAATTGTCATCACTGGCATCTTTTTTGATCA |
| | | TTGCACCATCATCAAATGCATTGGGATAACCATGAC |
| | | (SEQ ID NO: 185) |
| TIGIT | miR-22 | CATTTTCCCTCCCTTTCCCTTAGGAGCCTGTTCCTCTCACGCCCTC |
| | | ACCTGGCTGAGCCGCATCTGTACAGCAGCATCGATGGTTATGTC |
| | | CTGACCCAGCTAACCACGATGACTGCTGTGCAGATGCCCTCTGC |
| | | CCCTGGCTTCGAGGAGGAGGAGGAGCTGCTTTCCCCATCATCT |
| | | GGAAGGTG |
| | | (SEQ ID NO: 186) |
| TIGIT | miR-16 | cttcTGAAGAAAATATATTTCTTTTTATTCATAGCTCTTATGATAG |
| | | CAATGTCAGCAGTGCCTACCACGATGACTGCTGTGCAGATTAA |
| | | GATTCTAAAATTATCTTGCGCAGCTGTTCATCGTGGTAGTAAGG |
| | | TTGACCATACTCTACAGTTGTGTTTTAATGTATATTAATGTTACT |
| | | AATGTGTTTT |
| | | (SEQ ID NO: 187) |
| TIGIT | miR-16 | cttcTGAAGAAAATATATTTCTTTTTATTCATAGCTCTTATGATAG |
| | | CAATGTCAGCAGTGCCTACCACGATGACTGCTGTGCAGATTAA |
| | | GATTCTAAAATTATCTTGCGCAGCTGTTCATCGTGGTAAGTAAG |
| | | GTTGACCATACTCTACAGTTGTGTTTTAATGTATATTAATGTTAC |
| | | TAATGTGTTTT |
| | | (SEQ ID NO: 188) |
| TIGIT | miR-21 | TGTCTGCTTGTTTTGCCTACCATCGTGACATCTCCATGGCTGTAC |
| | | CACCTTGTCGGGACCACGATGACTGCTGTGCAGACTGTTGAATC |
| | | TCATGGCTGCGAAGCAGCATCGTGGCTCTGACATTTTGGTATCT |
| | | TTCATCTGACCATCCATATCCAATGTTCTCATTTAAACA |
| | | (SEQ ID NO: 189) |
| TIGIT | miR-494 | CAGTTCTGTTTTGATTTTTTTTGTTTGTTTTTTGATCAGTGCTAAT |
| | | CTTCGATACTCGAAGGATCTGCAACGCAGTCTCGCTGGTCTTTA |
| | | TTTATGAACCACGATGACTGCTGTGCAGATTTTTTAGTATCAAA |
| | | TCCCACCCTGGAGGCACTTCCTGTTCCTGATGCAGCCTTCAGGG |
| | | AGG |
| | | (SEQ ID NO: 190) |
| TIGIT | miR-142 | GGAGTCAGGAGGCCTGGGCAGCCTGAAGAGTACACGCCGACG |
| | | GACAGACAGACAGTGCAGTCACCACCACGATGACTGCTGTGCA |
| | | GAACAGCACTGGAGGGATGCACAGCAATCATCGTGGTGATGA |
| | | GTGTACTGTGGGCTTCGGAGATCACGCCACTGCTGCCGCCCGC |
| | | TGCCCGCCACCATCTTC |
| | | (SEQ ID NO: 191) |
| TIGIT | miR-19 | CCAATAATTCAAGCCAAGCAAGTATATAGGTGTTTTAATAGTTT |
| | | TTGTTTGCAGTCCTCTGATCTGCACAGCAGTTCGTGGTACAAGA |
| | | AGAATGTAGTACCACGATGACTGCTGTGCAGATTGGTGGCCTG |
| | | CTATTTCCTTCAAATGAATGATTTTTACTAATTTTGTGTACTTTTA |
| | | TTGTG |
| | | (SEQ ID NO: 192) |
| TIGIT | miR-1915 | CGGACCACGGTGTCCCCTTCTCTCCAGCTGGGGGTCTCGGGTCC |
| | | TGGCGCTGAGAGGCCGCACCACGATGACTGCTGTGCAGAGTGC |
| | | ACCCGTGTCTGCCAATAGCTGTAATCGTGGGCGGCCCTAGCGA |
| | | CCTGCGGCGGCGCCGGGAAAGCCCTGCCTCTGCAGCGGGTCCC |
| | | AGGGGTC |
| | | (SEQ ID NO: 193) |
| TIGIT | miR-206 | GATGCTACAAGTGGCCCACTTCTGAGATGCGGGCTGCTTCTGG |
| | | ATGACACTGCTTCCCGAGGCAGTCGTTGACTGTGGACTTATATA |
| | | TGGATTACTTTGCTATATCGTTCACGGTCAGCGACTGTTTCGGC |
| | | AAGTGCCTCCTCGCTGGCCCCAGGGTACCACCCGGAGCACAGG |
| | | TTTGGTGACCTT |
| | | (SEQ ID NO: 194) |
| TIGIT | miR-204 | AGGAGGGTGGGGGTGGAGGCAAGCAGAGGACTTCCTGATCGC |
| | | GTACCCATGGCTACAGTCTTTCTTCATGTGACTCGTGGACTATC |
| | | GTTCACGGTCAGCGACTGGAGAATATATGAAGGCAGTGCTGAA |
| | | CGTGAACGATCGTTCAATTGTCATCACTGGCATCTTTTTTGATCA |
| | | TTGCACCATCATCAAATGCATTGGGATAACCATGAC |
| | | (SEQ ID NO: 195) |
| TIGIT | miR-22 | CATTTTCCCTCCCTTTCCCTTAGGAGCCTGTTCCTCTCACGCCCTC |
| | | ACCTGGCTGAGCCGCATAGTCGCTGACTTGAACAGATATATGTC |
| | | CTGACCCAGCTATATCGTTCACGGTCAGCGACTGTGCCCTCTGC |
| | | CCCTGGCTTCGAGGAGGAGGAGGAGCTGCTTTCCCCATCATCT |
| | | GGAAGGTG |
| | | (SEQ ID NO: 196) |
| TIGIT | miR-142 | GGAGTCAGGAGGCCTGGGCAGCCTGAAGAGTACACGCCGACG |
| | | GACAGACAGACAGTGCAGTCACCTATCGTTCACGGTCAGCGAC |
| | | TAACAGCACTGGAGGGTGTCGCTGACAGTGAACGATAGATGA |
| | | GTGTACTGTGGGCTTCGGAGATCACGCCACTGCTGCCGCCCGC |
| | | TGCCCGCCACCATCTTC |
| | | (SEQ ID NO: 197) |
| TIGIT | miR-16 | cttcTGAAGAAAATATATTTCTTTTTATTCATAGCTCTTATGATAG |
| | | CAATGTCAGCAGTGCCTTATCGTTCACGGTCAGCGACTGTTAAG |
| | | ATTCTAAAATTATCTGTCGCTGAGCGCTGAACGATGAAGTAAG |
| | | GTTGACCATACTCTACAGTTGTGTTTTAATGTATATTAATGTTAC |
| | | TAATGTGTTTT |
| | | (SEQ ID NO: 198) |
| TIGIT | miR-206 | GATGCTACAAGTGGCCCACTTCTGAGATGCGGGCTGCTTCTGG |
| | | ATGACACTGCTTCCCGAGGACTACTTCAATGTCCTGACCTTATAT |
| | | GGATTACTTTGCTATAACTCAGGACATTGAAGTAGTTTTCGGCA |
| | | AGTGCCTCCTCGCTGGCCCCAGGGTACCACCCGGAGCACAGGT |
| | | TTGGTGACCTT |
| | | (SEQ ID NO: 199) |
| TIGIT | miR-204 | AGGAGGGTGGGGGTGGAGGCAAGCAGAGGACTTCCTGATCGC |
| | | GTACCCATGGCTACAGTCTTTCTTCATGTGACTCGTGGACTAAC |
| | | TCAGGACATTGAAGTAGTGAGAATATATGAAGGACTATTCAGA |
| | | GTCCTGAGTTCGTTCAATTGTCATCACTGGCATCTTTTTTGATCA |
| | | TTGCACCATCATCAAATGCATTGGGATAACCATGAC |
| | | (SEQ ID NO: 200) |
| TIGIT | miR-21 | TGTCTGCTTGTTTTGCCTACCATCGTGACATCTCCATGGCTGTAC |
| | | CACCTTGTCGGGTAACTCAGGACATTGAAGTAGTCTGTTGAATC |
| | | TCATGGCTACTCCAATGCCTGAGTTGTCTGACATTTTGGTATCTT |
| | | TCATCTGACCATCCATATCCAATGTTCTCATTTAAACA |
| | | (SEQ ID NO: 201) |
| TIGIT | miR-494 | CAGTTCTGTTTTGATTTTTTTTGTTTGTTTTTTGATCAGTGCTAAT |
| | | CTTCGATACTCGAAGGAACTACTGTAATGTCTGACGTTTCTTTAT |
| | | TTATGATAACTCAGGACATTGAAGTAGTTTTTTTAGTATCAAATC |
| | | CCACCCTGGAGGCACTTCCTGTTCCTGATGCAGCCTTCAGGGAGG |
| | | (SEQ ID NO: 202) |
| TIGIT | miR-19 | CCAATAATTCAAGCCAAGCAAGTATATAGGTGTTTTAATAGTTT |
| | | TTGTTTGCAGTCCTCTGGACTACTTCAATGTTGAGTTTACAAGA |
| | | AGAATGTAGTTAACTCAGGACATTGAAGTAGTCTGGTGGCCTG |
| | | CTATTTCCTTCAAATGAATGATTTTTACTAATTTTGTGTACTTTTA |
| | | TTGTG |
| | | (SEQ ID NO: 203) |
| TIGIT | miR-1915 | CGGACCACGGTGTCCCCTTCTCTCCAGCTGGGGGTCTCGGGTCC |
| | | TGGCGCTGAGAGGCCGCAGATCCACGTTACTCACCCTAGGTGC |
| | | ACCCGTGCTAGGCAGTGAGCAAAGTGGATCGCGGCCCTAGCGA |
| | | CCTGCGGCGGCGCCGGGAAAGCCCTGCCTCTGCAGCGGGTCCC |
| | | AGGGGTC |
| | | (SEQ ID NO: 204) |
| TIGIT | miR-204 | AGGAGGGTGGGGGTGGAGGCAAGCAGAGGACTTCCTGATCGC |
| | | GTACCCATGGCTACAGTCTTTCTTCATGTGACTCGTGGACAGAT |
| | | CCACGTTACTCACCCTAGGAGAATATATGAAGGCTAGGTGAGA |
| | | AACGTGGATCGGTTCAATTGTCATCACTGGCATCTTTTTTGATCA |
| | | TTGCACCATCATCAAATGCATTGGGATAACCATGAC |
| | | (SEQ ID NO: 205) |
| TIGIT | miR-206 | GATGCTACAAGTGGCCCACTTCTGAGATGCGGGCTGCTTCTGG |
| | | ATGACACTGCTTCCCGAGGCTAGGGTGAGTAACGTGGCCTCTT |
| | | ATGGATTACTTTGCTAAGATCCACGTTACTCACCCTAGTTTCGGC |
| | | AAGTGCCTCCTCGCTGGCCCCAGGGTACCACCCGGAGCACAGG |
| | | TTTGGTGACCTT |
| | | (SEQ ID NO: 206) |
| TIGIT | miR-21 | TGTCTGCTTGTTTTGCCTACCATCGTGACATCTCCATGGCTGTAC |
| | | CACCTTGTCGGGAGATCCACGTTACTCACCCTAGCTGTTGAATC |
| | | TCATGGTAGGGCGAGTACGTGGATCGTCTGACATTTTGGTATCT |
| | | TTCATCTGACCATCCATATCCAATGTTCTCATTTAAACA |
| | | (SEQ ID NO: 207) |
| TIGIT | miR-22 | CATTTTCCCTCCCTTTCCCTTAGGAGCCTGTTCCTCTCACGCCCTC |
| | | ACCTGGCTGAGCCGCACTAGGGTGAGTACGTGGCATCTTATGT |
| | | CCTGACCCAGCTAAGATCCACGTTACTCACCCTAGTGCCCTCTG |
| | | CCCCTGGCTTCGAGGAGGAGGAGGAGCTGCTTTCCCCATCATC |
| | | TGGAAGGTG |
| | | (SEQ ID NO: 208) |
| TIM3 | miR204 | AGGAGGGTGGGGGTGGAGGCAAGCAGAGGACTTCCTGATCGC |
| | | GTACCCATGGCTACAGTCTTTCTTCATGTGACTCGTGGACCATT |
| | | ATGCCTGGGATTTGGATCGAGAATATATGAAGGGATCAGATCG |
| | | CAGGCATAATTGTTCAATTGTCATCACTGGCATCTTTTTTGATCA |
| | | TTGCACCATCATCAAATGCATTGGGATAACCATGAC |
| | | (SEQ ID NO: 209) |
| TIM3 | miR150 | AGGGACTGGGCCCACGGGGAGGCAGCGTCCCCGAGGCAGCAG |
| | | CGGCAGCGGCGGCTCCTCTCCCCATGGCCCTGCATTATGCCTGG |
| | | GATTTGGATCCTGGGCTCAGACCTCCAAATCCACACATAGTGCA |
| | | GGGACCTGGGGACCCCGGCACCGGCAGGCCCCAAGGGGTGAG |
| | | GTGAGCGGGCATTGGGACCTCCCCTCCCTGTACTC |
| | | (SEQ ID NO: 210) |
| TIM3 | miR30a | CAGGTTAACCCAACAGAAGGCTAAAGAAGGTATATTGCTGTTG |
| | | ACAGTGAGCGACCATTATGCCTGGGATTTGGATCCTGTGAAGC |
| | | CACAGATGGGGATCCAGATCAGGCATAGTGGCTGCCTACTGCC |
| | | TCGGACTTCAAGGGGCTACTTTAGGAGCAATTATCTTGTTTA |
| | | (SEQ ID NO: 211) |
| TIM3 | miR206 | GATGCTACAAGTGGCCCACTTCTGAGATGCGGGCTGCTTCTGG |
| | | ATGACACTGCTTCCCGAGGGATCCGGATCCTAGGTATCCATGTA |
| | | TGGATTACTTTGCTACATTATGCCTGGGATTTGGATCTTTCGGC |
| | | AAGTGCCTCCTCGCTGGCCCCAGGGTACCACCCGGAGCACAGG |
| | | TTTGGTGACCTT |
| | | (SEQ ID NO: 212) |
| TIM3 | miR16 | CTTCTGAAGAAAATATATTTCTTTTTATTCATAGCTCTTATGATA |
| | | GCAATGTCAGCAGTGCCTCATTATGCCTGGGATTTGGATCTTAA |
| | | GATTCTAAAATTATCTTCCGAATCACATGGCATAATGAAGTAAG |
| | | GTTGACCATACTCTACAGTTGTGTTTTAATGTATATTAATGTTAC |
| | | TAATGTGTTTT |
| | | (SEQ ID NO: 213) |
| TIM3 | miR17 | TTAGCAGGAAAAAAGAGAACATCACCTTGTAAAACTGAAGATT |
| | | GTGACCAGTCAGAATAATGTCATTATGCCTGGGATTTGGATCGT |
| | | GATATGTGCATCGGCCAGAACCAAGGCATAAGTAGCATTATGG |
| | | TGACAGCTGCCTCGGGAAGCCAAGTTGGGCTTTAAAGTGCAGG |
| | | GCCTGCTGATGT |
| | | (SEQ ID NO: 214) |
| TIM3 | miR126 | CCGGGGTCCTGTCTGCATCCAGCGCAGCATTCTGGAAGACGCC |
| | | ACGCCTCCGCTGGCGACGGACTCCAAATCCCGTGCATAATCGCT |
| | | GTGACACTTCAAACCATTATGCCTGGGATTTGGATCCCGTCCAC |
| | | GGCACCGCATCGAAAACGCCGCTGAGACCTCAGCCTTGACCTC |
| | | CCTCAGCGTGG |
| | | (SEQ ID NO: 215) |
| TIM3 | miR122 | CAATGGTGGAATGTGGAGGTGAAGTTAACACCTTCGTGGCTAC |
| | | AGAGTTTCCTTAGCAGAGCTGCATTATGCCTGGGATTTGGATCT |
| | | GTCTAAACTATGATTCGAATCCAAGGCATATGGTAGCTACTGCT |
| | | AGGCAATCCTTCCCTCGATAAATGTCTTGGCATCGTTTGCTTTGA |
| | | GCAAGAAGGTTCATCTGATATCAGTCTTCTCAATCT |
| | | (SEQ ID NO: 216) |
| TIM3 | miR214 | ACAGGCTGATTGTATCTGTCTATGAGCAAAGGAAACCTGAAGG |
| | | AACCAAGGGCCTGGCTGGACAGAGTTGTCATGTGATGATGAAA |
| | | GGACAGTGAATTAGCAGAACATCCGCTCACCTGTTAATTCACAT |
| | | CCCTTTCATCAGCACATGACAACCCAGCCTGAATGACAACCAGC |
| | | CATTGAAAGAAAGCAGCCCTCACACCATAGCATCTA |
| | | (SEQ ID NO: 217) |
| TIM3 | miR29b1 | GGGTTTATTGTAAGAGAGCATTATGAAGAAAAAAATAGATCAT |
| | | AAAGCTTCTTCAGGACGATGGAAGGGTTGTGAACGTTAGATTT |
| | | AAATAGTGATTGTCTAATTCACATCCCTTTCATCAGTCTTGGGG |
| | | GAGACCAGCTGCGCTGCACTACCAACAGCAAAAGAAGTGAATG |
| | | GGACAGCT |
| | | (SEQ ID NO: 218) |
| TIM3 | miR204 | AGGAGGGTGGGGGTGGAGGCAAGCAGAGGACTTCCTGATCGC |
| | | GTACCCATGGCTACAGTCTTTCTTCATGTGACTCGTGGACTAATT |
| | | CACATCCCTTTCATCAGGAGAATATATGAAGGCTGAGGAAGAG |
| | | GTGTGAATTCGTTCAATTGTCATCACTGGCATCTTTTTTGATCAT |
| | | TGCACCATCATCAAATGCATTGGGATAACCATGAC |
| | | (SEQ ID NO: 219) |
| TIM3 | miR133a1 | TTTACCAATGAAAAGCATTTAACTGTTTTGGATTCCAAACTAGC |
| | | AGCACTACAATGCTTTGCTAGTGATGAATAGGCTGCGAATTATC |
| | | GCCTCTTCAATGGATAATTCACATCCCTTTCATCAGTAGCTATGC |
| | | ATTGATTACTACGGGACAACCAACGTTTTCATTTGTGAATATCA |
| | | ATTACTTGCCA |
| | | (SEQ ID NO: 220) |
| LAG3 | miR30a | CAGGTTAACCCAACAGAAGGCTAAAGAAGGTATATTGCTGTTG |
| | | ACAGTGAGCGACTAGTCGTTGGGTAAAGTCGCCACTGTGAAGC |
| | | CACAGATGGGTGGTGACTTCTCAACGATTAGCTGCCTACTGCCT |
| | | CGGACTTCAAGGGGCTACTTTAGGAGCAATTATCTTGTTTA |
| | | (SEQ ID NO: 221) |
| LAG3 | miR206 | GATGCTACAAGTGGCCCACTTCTGAGATGCGGGCTGCTTCTGG |
| | | ATGACACTGCTTCCCGAGGTGGCGATTTTACCCAATGCTCTATA |
| | | TGGATTACTTTGCTATAGTCGTTGGGTAAAGTCGCCATTTCGGC |
| | | AAGTGCCTCCTCGCTGGCCCCAGGGTACCACCCGGAGCACAGG |
| | | TTTGGTGACCTT |
| | | (SEQ ID NO: 222) |
| LAG3 | miR204 | AGGAGGGTGGGGGTGGAGGCAAGCAGAGGACTTCCTGATCGC |
| | | GTACCCATGGCTACAGTCTTTCTTCATGTGACTCGTGGACTAGT |
| | | CGTTGGGTAAAGTCGCCAGAGAATATATGAAGGTGGCACTTTC |
| | | CTCAACGACTCGTTCAATTGTCATCACTGGCATCTTTTTTGATCA |
| | | TTGCACCATCATCAAATGCATTGGGATAACCATGAC |
| | | (SEQ ID NO: 223) |
| LAG3 | miR150 | AGGGACTGGGCCCACGGGGAGGCAGCGTCCCCGAGGCAGCAG |
| | | CGGCAGCGGCGGCTCCTCTCCCCATGGCCCTGTAGTCGTTGGG |
| | | TAAAGTCGCCACTGGGCTCAGACCGCGACTTACCACACGACTAC |
| | | AGGGACCTGGGGACCCCGGCACCGGCAGGCCCCAAGGGGTGA |
| | | GGTGAGCGGGCATTGGGACCTCCCCTCCCTGTACTC |
| | | (SEQ ID NO: 224) |
| LAG3 | miR17 | TTAGCAGGAAAAAAGAGAACATCACCTTGTAAAACTGAAGATT |
| | | GTGACCAGTCAGAATAATGTGTTGCTTTCCGCTAAGTGGTGAGT |
| | | GATATGTGCATCTCCCACTCAGAGGAAAGCACTAGCATTATGGT |
| | | GACAGCTGCCTCGGGAAGCCAAGTTGGGCTTTAAAGTGCAGGG |
| | | CCTGCTGATGT |
| | | (SEQ ID NO: 225) |
| LAG3 | miR122 | CAATGGTGGAATGTGGAGGTGAAGTTAACACCTTCGTGGCTAC |
| | | AGAGTTTCCTTAGCAGAGCTGGTTGCTTTCCGCTAAGTGGTGAT |
| | | GTCTAAACTATTCACCACTTAGAGGAAAGCCTCTAGCTACTGCT |
| | | AGGCAATCCTTCCCTCGATAAATGTCTTGGCATCGTTTGCTTTGA |
| | | GCAAGAAGGTTCATCTGATATCAGTCTTCTCAATCT |
| | | (SEQ ID NO: 226) |
| LAG3 | miR126 | CCGGGGTCCTGTCTGCATCCAGCGCAGCATTCTGGAAGACGCC |
| | | ACGCCTCCGCTGGCGACGGGAACCACTTAGCGCGAAGCAAGGC |
| | | TGTGACACTTCAAACGTTGCTTTCCGCTAAGTGGTGACCGTCCA |
| | | CGGCACCGCATCGAAAACGCCGCTGAGACCTCAGCCTTGACCT |
| | | CCCTCAGCGTGG |
| | | (SEQ ID NO: 227) |
| GITR | miR30a | CAGGTTAACCCAACAGAAGGCTAAAGAAGGTATATTGCTGTTG |
| | | ACAGTGAGCGACTTTGCAGTGGCCTTCGTGGCCCCTGTGAAGC |
| | | CACAGATGGGGGGTCACGAGCCACTGCGAAGCTGCCTACTGCC |
| | | TCGGACTTCAAGGGGCTACTTTAGGAGCAATTATCTTGTTTA |
| | | (SEQ ID NO: 228) |
| GITR | miR206 | GATGCTACAAGTGGCCCACTTCTGAGATGCGGGCTGCTTCTGG |
| | | ATGACACTGCTTCCCGAGGGGGCTATGAAGGCCATTGAGAAAT |
| | | ATGGATTACTTTGCTATTTGCAGTGGCCTTCGTAGCCCTTTCGGC |
| | | AAGTGCCTCCTCGCTGGCCCCAGGGTACCACCCGGAGCACAGG |
| | | TTTGGTGACCTT |
| | | (SEQ ID NO: 229) |
| GITR | miR17 | TTAGCAGGAAAAAAGAGAACATCACCTTGTAAAACTGAAGATT |
| | | GTGACCAGTCAGAATAATGTTTTGCAGTGGCCTTCGTGGCCCGT |
| | | GATATGTGCATCGGTCACGTAGACTACTGCACTCGCATTATGGT |
| | | GACAGCTGCCTCGGGAAGCCAAGTTGGGCTTTAAAGTGCAGGG |
| | | CCTGCTGATGT |
| | | (SEQ ID NO: 230) |
| GITR | miR122 | CAATGGTGGAATGTGGAGGTGAAGTTAACACCTTCGTGGCTAC |
| | | AGAGTTTCCTTAGCAGAGCTGTTTGCAGTGGCCTTCGTGGCCCT |
| | | GTCTAAACTATGGGTCACGAAGACCACTGCCCATAGCTACTGCT |
| | | AGGCAATCCTTCCCTCGATAAATGTCTTGGCATCGTTTGCTTTGA |
| | | GCAAGAAGGTTCATCTGATATCAGTCTTCTCAATCT |
| | | (SEQ ID NO: 231) |
| GITR | miR150 | AGGGACTGGGCCCACGGGGAGGCAGCGTCCCCGAGGCAGCAG |
| | | CGGCAGCGGCGGCTCCTCTCCCCATGGCCCTGAGCCTCCCGTCC |
| | | TAAGACCCCACTGGGCTCAGACAGGGTCTTGGAAAGGAGGCTC |
| | | AGGGACCTGGGGACCCCGGCACCGGCAGGCCCCAAGGGGTGA |
| | | GGTGAGCGGGCATTGGGACCTCCCCTCCCTGTACTC |
| | | (SEQ ID NO: 232) |
| GITR | miR29 | GGGTTTATTGTAAGAGAGCATTATGAAGAAAAAAATAGATCAT |
| | | AAAGCTTCTTCAGGGTGGGTCTTAGGTCGGGAGCTGCTGATTT |
| | | AAATAGTGATTGTCAGCCTCCCGTCCTAAGACCCCACCTTGGGG |
| | | GAGACCAGCTGCGCTGCACTACCAACAGCAAAAGAAGTGAATG |
| | | GGACAGCT |
| | | (SEQ ID NO: 233) |
| GITR | miR181a1 | TCTCCCATCCCCTTCAGATACTTACAGATACTGTAAAGTGAGTA |
| | | GAATTCTGAGTTTTGAGGTTGCTTCAGTGAGCCTCCCGTCCTAA |
| | | GACCCCACTTGGAATTAAAATCAAGTGGGTCTTGACGGGTGGC |
| | | ACCCTATGGCTAACCATCATCTACTCCATGGTGCTCAGAATTCG |
| | | CTGAAGACAGGAAACCAAAGGTGGACACACCAGG |
| | | (SEQ ID NO: 234) |
| TIGIT | miR206 | GATGCTACAAGTGGCCCACTTCTGAGATGCGGGCTGCTTCTGG |
| | | ATGACACTGCTTCCCGAGGCCAGGGTGAGTAACGTGGCCTCTT |
| | | ATGGATTACTTTGCTAAGATCCACGTTACTCACCCTGGTTTCGG |
| | | CAAGTGCCTCCTCGCTGGCCCCAGGGTACCACCCGGAGCACAG |
| | | GTTTGGTGACCTT |
| | | (SEQ ID NO: 235) |
| TIGIT | miR30a | CAGGTTAACCCAACAGAAGGCTAAAGAAGGTATATTGCTGTTG |
| | | ACAGTGAGCGACAGATCCACGTTACTCACCCAAGCTGTGAAGC |
| | | CACAGATGGGCTTGGGTGAGACGTGGATCTGCTGCCTACTGCC |
| | | TCGGACTTCAAGGGGCTACTTTAGGAGCAATTATCTTGTTTA |
| | | (SEQ ID NO: 236) |
| TIGIT | miR133a1 | TTTACCAATGAAAAGCATTTAACTGTTTTGGATTCCAAACTAGC |
| | | AGCACTACAATGCTTTGCTAGAGGGGTGTATACCGCGGATCTTC |
| | | GCCTCTTCAATGGAAGATCCACGTTACTCACCCCTGTAGCTATG |
| | | CATTGATTACTACGGGACAACCAACGTTTTCATTTGTGAATATC |
| | | AATTACTTGCCA |
| | | (SEQ ID NO: 237) |
| TIGIT | miR122 | CAATGGTGGAATGTGGAGGTGAAGTTAACACCTTCGTGGCTAC |
| | | AGAGTTTCCTTAGCAGAGCTGAGATCCACGTTACTCACCCTTGT |
| | | GTCTAAACTATCAAGGGTGAGTCACGTGGAGATTAGCTACTGC |
| | | TAGGCAATCCTTCCCTCGATAAATGTCTTGGCATCGTTTGCTTTG |
| | | AGCAAGAAGGTTCATCTGATATCAGTCTTCTCAATCT |
| | | (SEQ ID NO: 238) |
| TIGIT | miR29b1 | GGGTTTATTGTAAGAGAGCATTATGAAGAAAAAAATAGATCAT |
| | | AAAGCTTCTTCAGGAAAGATCCACGTTACTCACCCTTAGATTTA |
| | | AATAGTGATTGTCTAGGTGAGTTACGTGGATCTGTTCTTGGGG |
| | | GAGACCAGCTGCGCTGCACTACCAACAGCAAAAGAAGTGAATG |
| | | GGACAGCT |
| | | (SEQ ID NO: 239) |
| TIGIT | miR214 | ACAGGCTGATTGTATCTGTCTATGAGCAAAGGAAACCTGAAGG |
| | | AACCAAGGGCCTGGCTGGACAGAGTTGTCATGTGTCAGATCCA |
| | | CGTTACTCACCCTGCAGAACATCCGCTCACCTGTAGGGTGAGAC |
| | | TCGTGGATCTGTCACATGACAACCCAGCCTGAATGACAACCAGC |
| | | CATTGAAAGAAAGCAGCCCTCACACCATAGCATCTA |
| | | (SEQ ID NO: 240) |
| PD1 | miR30a | CAGGTTAACCCAACAGAAGGCTAAAGAAGGTATATTGCTGTTG |
| | | ACAGTGAGCGACTTCAGGAATGGGTTCCAAGGAGCTGTGAAGC |
| | | CACAGATGGGCTCCTTGGACCATTCCTGAAGCTGCCTACTGCCT |
| | | CGGACTTCAAGGGGCTACTTTAGGAGCAATTATCTTGTTTA |
| | | (SEQ ID NO: 241) |
| PD1 | miR412 | GTCTTGGAGGCTGGGGCACCTCGGGGAAGGACGCCGGCATCA |
| | | GCACCATTCTGGGGTACGGGGATGGATTCAGGAATGGGTTCCA |
| | | AGGAATTGTTTCTAATGTCCTGAAGCCATTCATGGAGCCGTCCG |
| | | TATCCGCTGCAGCCTGTGGGGCCTGCGGGCCGGGGAGCCGATC |
| | | GCGCTTCAGCTCAGCGCCT |
| | | (SEQ ID NO: 242) |
| PD1 | miR17 | TTAGCAGGAAAAAAGAGAACATCACCTTGTAAAACTGAAGATT |
| | | GTGACCAGTCAGAATAATGTTTCAGGAATGGGTTCCAAGGAAG |
| | | TGATATGTGCATCTTCTTGGTACACGTTCCTGCTCACATTATGGT |
| | | GACAGCTGCCTCGGGAAGCCAAGTTGGGCTTTAAAGTGCAGGG |
| | | CCTGCTGATGT |
| | | (SEQ ID NO: 243) |
| PD1 | miR122 | CAATGGTGGAATGTGGAGGTGAAGTTAACACCTTCGTGGCTAC |
| | | AGAGTTTCCTTAGCAGAGCTGTTCAGGAATGGGTTCCAAGGAG |
| | | TGTCTAAACTATCTCCTTGGAACACATTCCTACATAGCTACTGCT |
| | | AGGCAATCCTTCCCTCGATAAATGTCTTGGCATCGTTTGCTTTGA |
| | | GCAAGAAGGTTCATCTGATATCAGTCTTCTCAATCT |
| | | (SEQ ID NO: 244) |
| PD1 | miR150 | AGGGACTGGGCCCACGGGGAGGCAGCGTCCCCGAGGCAGCAG |
| | | CGGCAGCGGCGGCTCCTCTCCCCATGGCCCTGTATAATATAATA |
| | | GAACCACAGGCTGGGCTCAGACGTGTGGTTTATCCTGTTGTAC |
| | | AGGGACCTGGGGACCCCGGCACCGGCAGGCCCCAAGGGGTGA |
| | | GGTGAGCGGGCATTGGGACCTCCCCTCCCTGTACTC |
| | | (SEQ ID NO: 245) |
| PD1 | miR486 | TGTGGTGCTGGGGGCTTCAGCGGCCGGCTCTGATCTCCATCCTC |
| | | CCTGGGGCATATAATATAATAGAACCACAGGGCCCTTCATGCTG |
| | | CCCAGCTTGTGGTTCTATTATGTTATAACTCGGGGTGGGAGTCA |
| | | GCAGGAGGTGAGGGGGCATGGTGGCCCCAGTGCAGC |
| | | (SEQ ID NO: 246) |
| PD1 | miR206 | GATGCTACAAGTGGCCCACTTCTGAGATGCGGGCTGCTTCTGG |
| | | ATGACACTGCTTCCCGAGGCGTGCTGAACTGGTATCGAAATGT |
| | | ATGGATTACTTTGCTACATGCGGTACCAGTTTAGCACGTTTCGG |
| | | CAAGTGCCTCCTCGCTGGCCCCAGGGTACCACCCGGAGCACAG |
| | | GTTTGGTGACCTT |
| | | (SEQ ID NO: 247) |
| PD1 | miR122 | CAATGGTGGAATGTGGAGGTGAAGTTAACACCTTCGTGGCTAC |
| | | AGAGTTTCCTTAGCAGAGCTGCATGCGGTACCAGTTTAGCACGT |
| | | GTCTAAACTATCGTGCTAGACTTGTACTGTCAGTAGCTACTGCT |
| | | AGGCAATCCTTCCCTCGATAAATGTCTTGGCATCGTTTGCTTTGA |
| | | GCAAGAAGGTTCATCTGATATCAGTCTTCTCAATCT |
| | | (SEQ ID NO: 248) |
| PD1 | miR30a | CAGGTTAACCCAACAGAAGGCTAAAGAAGGTATATTGCTGTTG |
| | | ACAGTGAGCGACCATGCGGTACCAGTTTAGCACGCTGTGAAGC |
| | | CACAGATGGGCGTGCTAGAGGTGTCGCATGGCTGCCTACTGCC |
| | | TCGGACTTCAAGGGGCTACTTTAGGAGCAATTATCTTGTTTA |
| | | (SEQ ID NO: 249) |
| CTLA4 | miR206 | GATGCTACAAGTGGCCCACTTCTGAGATGCGGGCTGCTTCTGG |
| | | ATGACACTGCTTCCCGAGGCAGCGAGGGAGAAGATTACCATTT |
| | | ATGGATTACTTTGCTAAATATAGTCTTCTCCCTCGCTGTTTCGGC |
| | | AAGTGCCTCCTCGCTGGCCCCAGGGTACCACCCGGAGCACAGG |
| | | TTTGGTGACCTT |
| | | (SEQ ID NO: 250) |
| CTLA4 | miR26a | TGAAGCCACAGGAGCCAAGAGCAGGAGGACCAAGGCCCTGGC |
| | | GAAGGCCGTGGCCTCGAATATAGTCTTCTCCCTCGCTTGTGCAG |
| | | GTCCCAATGGAGCGAGGGATAGGACTATACTCGGGGACGCGG |
| | | GCCTGGACGCCGGCATCCGGGCTCAGGACCCCCCTCTCTGCCA |
| | | GAGGC |
| | | (SEQ ID NO: 251) |
| CTLA4 | miR30a | CAGGTTAACCCAACAGAAGGCTAAAGAAGGTATATTGCTGTTG |
| | | ACAGTGAGCGACAATATAGTCTTCTCCCTCGCTGCTGTGAAGCC |
| | | ACAGATGGGCAGTGAGGGAAGACTATGTTGCTGCCTACTGCCT |
| | | CGGACTTCAAGGGGCTACTTTAGGAGCAATTATCTTGTTTA |
| | | (SEQ ID NO: 252) |
| PIK3IP1 | miR206 | GATGCTACAAGTGGCCCACTTCTGAGATGCGGGCTGCTTCTGG |
| | | ATGACACTGCTTCCCGAGGCCGGTTGAACATTGGTTGCCTCATA |
| | | TGGATTACTTTGCTATGAACGACCAGTGTTTAACCGGTTTCGGC |
| | | AAGTGCCTCCTCGCTGGCCCCAGGGTACCACCCGGAGCACAGG |
| | | TTTGGTGACCTT |
| | | (SEQ ID NO: 253) |
| PIK3IP1 | miR126 | CCGGGGTCCTGTCTGCATCCAGCGCAGCATTCTGGAAGACGCC |
| | | ACGCCTCCGCTGGCGACGGGACGGATGAACTTAGAGGAGACG |
| | | CTGTGACACTTCAAACTTCTCCTTGGAGTTCATCCGCGCCGTCCA |
| | | CGGCACCGCATCGAAAACGCCGCTGAGACCTCAGCCTTGACCT |
| | | CCCTCAGCGTGG |
| | | (SEQ ID NO: 254) |
| PIK3IP1 | miR30a | CAGGTTAACCCAACAGAAGGCTAAAGAAGGTATATTGCTGTTG |
| | | ACAGTGAGCGACTTCTCCTTGGAGTTCATCCGCGCTGTGAAGCC |
| | | ACAGATGGGCGCGGATGATCCAAGGAGGAGCTGCCTACTGCCT |
| | | CGGACTTCAAGGGGCTACTTTAGGAGCAATTATCTTGTTTA |
| | | (SEQ ID NO: 255) |
| TCRa3′UTR | miR150 | AGGGACTGGGCCCACGGGGAGGCAGCGTCCCCGAGGCAGCAG |
| | | CGGCAGCGGCGGCTCCTCTCCCCATGGCCCTGATACACATCAGA |
| | | ATCCTTACTGCTGGGCTCAGACCGTAAGGATCTCCTGTGTATCA |
| | | GGGACCTGGGGACCCCGGCACCGGCAGGCCCCAAGGGGTGAG |
| | | GCGAGCGGGCATTGGGACCTCCCCTCCCTGTACTC |
| | | (SEQ ID NO: 256) |
| TCRa3′UTR | miR204 | AGGAGGGTGGGGGTGGAGGCAAGCAGAGGACTTCCTGATCGC |
| | | GTACCCATGGCTACAGTCTTTCTTCATGTGACTCGTGGACATAC |
| | | ACATCAGAATCCTTACTTGAGAATATATGAAGGAGGTAGGATA |
| | | CTGATGTGTACGTTCAATTGTCATCACTGGCATCTTTTTTGATCA |
| | | TTGCACCATCATCAAATGCATTGGGATAACCATGAC |
| | | (SEQ ID NO: 257) |
| TCRa3′UTR | miR206 | GATGCTACAAGTGGCCCACTTCTGAGATGCGGGCTGCTTCTGG |
| | | ATGACACTGCTTCCCGAGGCGGTAAGGATTCTGATGTAATATTA |
| | | TGGATTACTTTGCTAATACACATCAGAATCCTTACTGTTTCGGCA |
| | | AGTGCCTCCTCGCTGGCCCCAGGGTACCACCCGGAGCACAGGT |
| | | TTGGTGACCTT |
| | | (SEQ ID NO: 258) |
| TCRa3′UTR | miR26a | TGAAGCCACAGGAGCCAAGAGCAGGAGGACCAAGGCCCTGGC |
| | | GAAGGCCGTGGCCTCGATACACATCAGAATCCTTACTTGTGCAG |
| | | GTCCCAATGGAGTAAGGATCCTGATGTGTCTCGGGGACGCGGG |
| | | CCTGGACGCCGGCATCCGGGCTCAGGACCCCCCTCTCTGCCAG |
| | | AGGC |
| | | (SEQ ID NO: 259) |
| TCRa3′UTR | miR150 | AGGGACTGGGCCCACGGGGAGGCAGCGTCCCCGAGGCAGCAG |
| | | CGGCAGCGGCGGCTCCTCTCCCCATGGCCCTGTTGTTGAAGGC |
| | | GTTTGCACATGCTGGGCTCAGACCTGTGCAATGCGATCAATAG |
| | | CAGGGACCTGGGGACCCCGGCACCGGCAGGCCCCAAGGGGTG |
| | | AGGCGAGCGGGCATTGGGACCTCCCCTCCCTGTACTC |
| | | (SEQ ID NO: 260) |
| TCRa3′UTR | miR16 | CTTCTGAAGAAAATATATTTCTTTTTATTCATAGCTCTTATGATA |
| | | GCAATGTCAGCAGTGCCTTTGTTGAAGGCGTTTGCACATGTTAA |
| | | GATTCTAAAATTATCTTGTGCGGAAGCACTTCAATAAAAGTAAG |
| | | GTTGACCATACTCTACAGTTGTGTTTTAATGTATATTAATGTTAC |
| | | TAATGTGTTTT |
| | | (SEQ ID NO: 261) |
| TCRa3′UTR | miR206 | GATGCTACAAGTGGCCCACTTCTGAGATGCGGGCTGCTTCTGG |
| | | ATGACACTGCTTCCCGAGGCGTGTGTGAACGCCTTCACATAATA |
| | | TGGATTACTTTGCTATTGTTGAAGGCGTTTGCACATGTTTCGGC |
| | | AAGTGCCTCCTCGCTGGCCCCAGGGTACCACCCGGAGCACAGG |
| | | TTTGGTGACCTT |
| | | (SEQ ID NO: 262) |
| TCRa3′UTR | miR26a | TGAAGCCACAGGAGCCAAGAGCAGGAGGACCAAGGCCCTGGC |
| | | GAAGGCCGTGGCCTCGTTGTTGAAGGCGTTTGCACATTGTGCA |
| | | GGTCCCAATGGGTGTGCAAAGGTCTTCAATCACGGGGACGCGG |
| | | GCCTGGACGCCGGCATCCGGGCTCAGGACCCCCCTCTCTGCCA |
| | | GAGGC |
| | | (SEQ ID NO: 263) |

Non-naturally occurring miRNA sequences (two or more pri-miRNAs)

| miRNA | miRNA | |
|---|---|---|
| Target | backbone | DNA Sequence |
| PD1 | miR204 + | AGGAGGGTGGGGGTGGAGGCAAGCAGAGGACTTCCTGATCGCGTACCC |
| | miR206 | ATGGCTACAGTCTTTCTTCATGTGACTCGTGGACTTCAGGAATGGGTTCC |
| | | AAGGATGAGAATATATGAAGGATCCTGGAAGCTATTCCTGACGTTCAATT |
| | | GTCATCACTGGCATCTTTTTTGATCATTGCACCATCATCAAATGCATTGGG |
| | | ATAACCATGACGATGCTACAAGTGGCCCACTTCTGAGATGCGGGCTGCTT |
| | | CTGGATGACACTGCTTCCCGAGGCCTGTGGTTCTGTTATATCCATATATG |
| | | GATTACTTTGCTATATAATATAATAGAACCACAGGTTTCGGCAAGTGCCT |
| | | CCTCGCTGGCCCCAGGGTACCACCCGGAGCACAGGTTTGGTGACCTT |
| | | (SEQ ID NO: 267) |
| PD1 + TIGIT | miR204 + | AGGAGGGTGGGGGTGGAGGCAAGCAGAGGACTTCCTGATCGCGTACCC |
| | miR150 | ATGGCTACAGTCTTTCTTCATGTGACTCGTGGACTTCAGGAATGGGTTCC |
| | | AAGGATGAGAATATATGAAGGATCCTGGAAGCTATTCCTGACGTTCAATT |
| | | GTCATCACTGGCATCTTTTTTGATCATTGCACCATCATCAAATGCATTGGG |
| | | ATAACCATGACAGGGACTGGGCCCACGGGGAGGCAGCGTCCCCGAGGC |
| | | AGCAGCGGCAGCGGCGGCTCCTCTCCCCATGGCCCTGAGATCCACGTTA |
| | | CTCACCCGTGCTGGGCTCAGACCCGGGTGATAATATGGATCTCAGGGAC |
| | | CTGGGGACCCCGGCACCGGCAGGCCCCAAGGGGTGAGGTGAGCGGGCA |
| | | TTGGGACCTCCCCTCCCTGTACTC |
| | | (SEQ ID NO: 268) |
| PD1 + TIGIT | miR206 + | GATGCTACAAGTGGCCCACTTCTGAGATGCGGGCTGCTTCTGGATGACA |
| | miR150 | CTGCTTCCCGAGGCCTGTGGTTCTGTTATATCCATATATGGATTACTTTGC |
| | | TATATAATATAATAGAACCACAGGTTTCGGCAAGTGCCTCCTCGCTGGCC |
| | | CCAGGGTACCACCCGGAGCACAGGTTTGGTGACCTTAGGGACTGGGCCC |
| | | ACGGGGAGGCAGCGTCCCCGAGGCAGCAGCGGCAGCGGCGGCTCCTCT |
| | | CCCCATGGCCCTGAGATCCACGTTACTCACCCGTGCTGGGCTCAGACCCG |
| | | GGTGATAATATGGATCTCAGGGACCTGGGGACCCCGGCACCGGCAGGC |
| | | CCCAAGGGGTGAGGTGAGCGGGCATTGGGACCTCCCCTCCCTGTACTC |
| | | (SEQ ID NO: 269) |
| TIGIT + PD1 | miR17 + | TTAGCAGGAAAAAAGAGAACATCACCTTGTAAAACTGAAGATTGTGACC |
| | miR204 | AGTCAGAATAATGTAGATCCACGTTACTCACCCTAGTGATATGTGCATCT |
| | | AGGGTGTGTCATGTGGATGAAGCATTATGGTGACAGCTGCCTCGGGAAG |
| | | CCAAGTTGGGCTTTAAAGTGCAGGGCCTGCTGATGTAGGAGGGTGGGG |
| | | GTGGAGGCAAGCAGAGGACTTCCTGATCGCGTACCCATGGCTACAGTCT |
| | | TTCTTCATGTGACTCGTGGACTTCAGGAATGGGTTCCAAGGATGAGAATA |
| | | TATGAAGGATCCTGGAAGCTATTCCTGACGTTCAATTGTCATCACTGGCA |
| | | TCTTTTTTGATCATTGCACCATCATCAAATGCATTGGGATAACCATGAC |
| | | (SEQ ID NO: 270) |
| TIGIT + PD1 | miR17 + | TTAGCAGGAAAAAAGAGAACATCACCTTGTAAAACTGAAGATTGTGACC |
| | miR206 | AGTCAGAATAATGTAGATCCACGTTACTCACCCTAGTGATATGTGCATCT |
| | | AGGGTGTGTCATGTGGATGAAGCATTATGGTGACAGCTGCCTCGGGAAG |
| | | CCAAGTTGGGCTTTAAAGTGCAGGGCCTGCTGATGTGATGCTACAAGTG |
| | | GCCCACTTCTGAGATGCGGGCTGCTTCTGGATGACACTGCTTCCCGAGGC |
| | | CTGTGGTTCTGTTATATCCATATATGGATTACTTTGCTATATAATATAATA |
| | | GAACCACAGGTTTCGGCAAGTGCCTCCTCGCTGGCCCCAGGGTACCACCC |
| | | GGAGCACAGGTTTGGTGACCTT |
| | | (SEQ ID NO: 271) |
| TIGIT + PD1 | miR204 + | AGGAGGGTGGGGGTGGAGGCAAGCAGAGGACTTCCTGATCGCGTACCC |
| | miR206 | ATGGCTACAGTCTTTCTTCATGTGACTCGTGGACAGATCCACGTTACTCAC |
| | | CCCCTGAGAATATATGAAGGAGGGGTGAGAAGCGTGGATCCGTTCAATT |
| | | GTCATCACTGGCATCTTTTTTGATCATTGCACCATCATCAAATGCATTGGG |
| | | ATAACCATGACGATGCTACAAGTGGCCCACTTCTGAGATGCGGGCTGCTT |
| | | CTGGATGACACTGCTTCCCGAGGCCTGTGGTTCTGTTATATCCATATATG |
| | | GATTACTTTGCTATATAATATAATAGAACCACAGGTTTCGGCAAGTGCCT |
| | | CCTCGCTGGCCCCAGGGTACCACCCGGAGCACAGGTTTGGTGACCTT |
| | | (SEQ ID NO: 272) |
| TIGIT + PD1 | miR150 + | AGGGACTGGGCCCACGGGGAGGCAGCGTCCCCGAGGCAGCAGCGGCA |
| | miR204 | GCGGCGGCTCCTCTCCCCATGGCCCTGAGATCCACGTTACTCACCCGTGC |
| | | TGGGCTCAGACCCGGGTGATAATATGGATCTCAGGGACCTGGGGACCCC |
| | | GGCACCGGCAGGCCCCAAGGGGTGAGGTGAGCGGGCATTGGGACCTCC |
| | | CCTCCCTGTACTCAGGAGGGTGGGGGTGGAGGCAAGCAGAGGACTTCCT |
| | | GATCGCGTACCCATGGCTACAGTCTTTCTTCATGTGACTCGTGGACTTCA |
| | | GGAATGGGTTCCAAGGATGAGAATATATGAAGGATCCTGGAAGCTATTC |
| | | CTGACGTTCAATTGTCATCACTGGCATCTTTTTTGATCATTGCACCATCAT |
| | | CAAATGCATTGGGATAACCATGAC |
| | | (SEQ ID NO: 273) |
| TIGIT + PD1 | miR150 + | AGGGACTGGGCCCACGGGGAGGCAGCGTCCCCGAGGCAGCAGCGGCA |
| | miR206 | GCGGCGGCTCCTCTCCCCATGGCCCTGAGATCCACGTTACTCACCCGTGC |
| | | TGGGCTCAGACCCGGGTGATAATATGGATCTCAGGGACCTGGGGACCCC |
| | | GGCACCGGCAGGCCCCAAGGGGTGAGGTGAGCGGGCATTGGGACCTCC |
| | | CCTCCCTGTACTCGATGCTACAAGTGGCCCACTTCTGAGATGCGGGCTGC |
| | | TTCTGGATGACACTGCTTCCCGAGGCCTGTGGTTCTGTTATATCCATATAT |
| | | GGATTACTTTGCTATATAATATAATAGAACCACAGGTTTCGGCAAGTGCC |
| | | TCCTCGCTGGCCCCAGGGTACCACCCGGAGCACAGGTTTGGTGACCTT |
| | | (SEQ ID NO: 274) |
| TIGIT + | miR17 + | TTAGCAGGAAAAAAGAGAACATCACCTTGTAAAACTGAAGATTGTGACC |
| PD1 + PD1 | miR204 + | AGTCAGAATAATGTAGATCCACGTTACTCACCCTAGTGATATGTGCATCT |
| | miR206 | AGGGTGTGTCATGTGGATGAAGCATTATGGTGACAGCTGCCTCGGGAAG |
| | | CCAAGTTGGGCTTTAAAGTGCAGGGCCTGCTGATGTAGGAGGGTGGGG |
| | | GTGGAGGCAAGCAGAGGACTTCCTGATCGCGTACCCATGGCTACAGTCT |
| | | TTCTTCATGTGACTCGTGGACTTCAGGAATGGGTTCCAAGGATGAGAATA |
| | | TATGAAGGATCCTGGAAGCTATTCCTGACGTTCAATTGTCATCACTGGCA |
| | | TCTTTTTTGATCATTGCACCATCATCAAATGCATTGGGATAACCATGACGA |
| | | TGCTACAAGTGGCCCACTTCTGAGATGCGGGCTGCTTCTGGATGACACTG |
| | | CTTCCCGAGGCCTGTGGTTCTGTTATATCCATATATGGATTACTTTGCTAT |
| | | ATAATATAATAGAACCACAGGTTTCGGCAAGTGCCTCCTCGCTGGCCCCA |
| | | GGGTACCACCCGGAGCACAGGTTTGGTGACCTT |
| | | (SEQ ID NO: 275) |
| TIGIT + | miR17 + | TTAGGATGAGTTGAGATCCCAGTGATCTTCTCGCTAAGAGTTTCCTGCCT |
| PD1 + PD1 | miR204 + | GGGCAAGGAGGAAATTAGCAGGAAAAAAGAGAACATCACCTTGTAAAA |
| | miR206 extra | CTGAAGATTGTGACCAGTCAGAATAATGTAGATCCACGTTACTCACCCTA |
| | spacing 1 | GTGATATGTGCATCTAGGGTGTGTCATGTGGATGAAGCATTATGGTGAC |
| | | AGCTGCCTCGGGAAGCCAAGTTGGGCTTTAAAGTGCAGGGCCTGCTGAT |
| | | GTAGGAGGGTGGGGGTGGAGGCAAGCAGAGGACTTCCTGATCGCGTAC |
| | | CCATGGCTACAGTCTTTCTTCATGTGACTCGTGGACTTCAGGAATGGGTT |
| | | CCAAGGATGAGAATATATGAAGGATCCTGGAAGCTATTCCTGACGTTCA |
| | | ATTGTCATCACTGGCATCTTTTTTGATCATTGCACCATCATCAAATGCATT |
| | | GGGATAACCATGACGATGCTACAAGTGGCCCACTTCTGAGATGCGGGCT |
| | | GCTTCTGGATGACACTGCTTCCCGAGGCCTGTGGTTCTGTTATATCCATAT |
| | | ATGGATTACTTTGCTATATAATATAATAGAACCACAGGTTTCGGCAAGTG |
| | | CCTCCTCGCTGGCCCCAGGGTACCACCCGGAGCACAGGTTTGGTGACCTT |
| | | CTTCCTCATCAGGGCTTTGTGCCAGCAAATGACTCCCTCACCAAGGAAGC |
| | | AAGAGCCTCTGAATCCCATCTGGGCTCTTCCTGAACACCCCTATCTCCCCC |
| | | TCT |
| | | (SEQ ID NO: 276) |
| TIGIT + | miR17 + | TTAGGGATTATGCTGAATTTGTATGGTTTATAGTTGTTAGAGTTTGAGGT |
| PD1 + PD1 | miR204 + | GTTAATTCTAATTATCTATTTCAAATTTTAGCAGGAAAAAAGAGAACATC |
| | miR206 extra | ACCTTGTAAAACTGAAGATTGTGACCAGTCAGAATAATGTAGATCCACGT |
| | spacing 2 | TACTCACCCTAGTGATATGTGCATCTAGGGTGTGTCATGTGGATGAAGCA |
| | | TTATGGTGACAGCTGCCTCGGGAAGCCAAGTTGGGCTTTAAAGTGCAGG |
| | | GCCTGCTGATGTAGGAGGGTGGGGGTGGAGGCAAGCAGAGGACTTCCT |
| | | GATCGCGTACCCATGGCTACAGTCTTTCTTCATGTGACTCGTGGACTTCA |
| | | GGAATGGGTTCCAAGGATGAGAATATATGAAGGATCCTGGAAGCTATTC |
| | | CTGACGTTCAATTGTCATCACTGGCATCTTTTTTGATCATTGCACCATCAT |
| | | CAAATGCATTGGGATAACCATGACGATGCTACAAGTGGCCCACTTCTGA |
| | | GATGCGGGCTGCTTCTGGATGACACTGCTTCCCGAGGCCTGTGGTTCTGT |
| | | TATATCCATATATGGATTACTTTGCTATATAATATAATAGAACCACAGGTT |
| | | TCGGCAAGTGCCTCCTCGCTGGCCCCAGGGTACCACCCGGAGCACAGGT |
| | | TTGGTGACCTTCTTCCTCATCAGGGCTTTGTGCCAGCAAATGACTCCCTCA |
| | | CCAAGGAAGCAAGAGCCTCTGAATCCCATCTGGGCTCTTCCTGAACACCC |
| | | CTATCTCCCCCTCT |
| | | (SEQ ID NO: 277) |
| PD1 + PD1 + | miR204 + | AGGAGGGTGGGGGTGGAGGCAAGCAGAGGACTTCCTGATCGCGTACCC |
| TIGIT | miR206 + | ATGGCTACAGTCTTTCTTCATGTGACTCGTGGACTTCAGGAATGGGTTCC |
| | miR17 | AAGGATGAGAATATATGAAGGATCCTGGAAGCTATTCCTGACGTTCAATT |
| | | GTCATCACTGGCATCTTTTTTGATCATTGCACCATCATCAAATGCATTGGG |
| | | ATAACCATGACGATGCTACAAGTGGCCCACTTCTGAGATGCGGGCTGCTT |
| | | CTGGATGACACTGCTTCCCGAGGCCTGTGGTTCTGTTATATCCATATATG |
| | | GATTACTTTGCTATATAATATAATAGAACCACAGGTTTCGGCAAGTGCCT |
| | | CCTCGCTGGCCCCAGGGTACCACCCGGAGCACAGGTTTGGTGACCTTTTA |
| | | GCAGGAAAAAAGAGAACATCACCTTGTAAAACTGAAGATTGTGACCAGT |
| | | CAGAATAATGTAGATCCACGTTACTCACCCTAGTGATATGTGCATCTAGG |
| | | GTGTGTCATGTGGATGAAGCATTATGGTGACAGCTGCCTCGGGAAGCCA |
| | | AGTTGGGCTTTAAAGTGCAGGGCCTGCTGATGT |
| | | (SEQ ID NO: 278) |
| PD1 + PD1 + | miR204 + | TTAGGATGAGTTGAGATCCCAGTGATCTTCTCGCTAAGAGTTTCCTGCCT |
| TIGIT | miR206 + | GGGCAAGGAGGAAAAGGAGGGTGGGGGTGGAGGCAAGCAGAGGACTT |
| | miR17 extra | CCTGATCGCGTACCCATGGCTACAGTCTTTCTTCATGTGACTCGTGGACTT |
| | spacing 1 | CAGGAATGGGTTCCAAGGATGAGAATATATGAAGGATCCTGGAAGCTAT |
| | | TCCTGACGTTCAATTGTCATCACTGGCATCTTTTTTGATCATTGCACCATC |
| | | ATCAAATGCATTGGGATAACCATGACGATGCTACAAGTGGCCCACTTCTG |
| | | AGATGCGGGCTGCTTCTGGATGACACTGCTTCCCGAGGCCTGTGGTTCTG |
| | | TTATATCCATATATGGATTACTTTGCTATATAATATAATAGAACCACAGGT |
| | | TTCGGCAAGTGCCTCCTCGCTGGCCCCAGGGTACCACCCGGAGCACAGG |
| | | TTTGGTGACCTTTTAGCAGGAAAAAAGAGAACATCACCTTGTAAAACTGA |
| | | AGATTGTGACCAGTCAGAATAATGTAGATCCACGTTACTCACCCTAGTGA |
| | | TATGTGCATCTAGGGTGTGTCATGTGGATGAAGCATTATGGTGACAGCT |
| | | GCCTCGGGAAGCCAAGTTGGGCTTTAAAGTGCAGGGCCTGCTGATGTCT |
| | | TCCTCATCAGGGCTTTGTGCCAGCAAATGACTCCCTCACCAAGGAAGCAAG |
| | | AGCCTCTGAATCCCATCTGGGCTCTTCCTGAACACCCCTATCTCCCCCTCT |
| | | (SEQ ID NO: 279) |
| PD1 + PD1 + | miR204 + | TGGAGAGGAGGGTGGGGGTGGAGGCAAGCAGAGGACCTCCTGATCAT |
| TIGIT | miR206 + | GTACCCATAGGACAGGGTGATGGAAAGGAGGGTGGGGGTGGAGGCAA |
| | miR17 extra | GCAGAGGACTTCCTGATCGCGTACCCATGGCTACAGTCTTTCTTCATGTG |
| | spacing 2 | ACTCGTGGACTTCAGGAATGGGTTCCAAGGATGAGAATATATGAAGGAT |
| | | CCTGGAAGCTATTCCTGACGTTCAATTGTCATCACTGGCATCTTTTTTGAT |
| | | CATTGCACCATCATCAAATGCATTGGGATAACCATGACGATGCTACAAGT |
| | | GGCCCACTTCTGAGATGCGGGCTGCTTCTGGATGACACTGCTTCCCGAG |
| | | GCCTGTGGTTCTGTTATATCCATATATGGATTACTTTGCTATATAATATAA |
| | | TAGAACCACAGGTTTCGGCAAGTGCCTCCTCGCTGGCCCCAGGGTACCAC |
| | | CCGGAGCACAGGTTTGGTGACCTTTTAGCAGGAAAAAAGAGAACATCAC |
| | | CTTGTAAAACTGAAGATTGTGACCAGTCAGAATAATGTAGATCCACGTTA |
| | | CTCACCCTAGTGATATGTGCATCTAGGGTGTGTCATGTGGATGAAGCATT |
| | | ATGGTGACAGCTGCCTCGGGAAGCCAAGTTGGGCTTTAAAGTGCAGGGC |
| | | CTGCTGATGTCTTCCTCATCAGGGCTTTGTGCCAGCAAATGACTCCCTCAC |
| | | CAAGGAAGCAAGAGCCTCTGAATCCCATCTGGGCTCTTCCTGAACACCCC |
| | | TATCTCCCCCTCT |
| | | (SEQ ID NO: 280) |
| PD1 + CTLA4 | miR204 + | AGGAGGGTGGGGGTGGAGGCAAGCAGAGGACTTCCTGATCGCGTACCC |
| | miR26a | ATGGCTACAGTCTTTCTTCATGTGACTCGTGGACTTCAGGAATGGGTTCC |
| | | AAGGATGAGAATATATGAAGGATCCTGGAAGCTATTCCTGACGTTCAATT |
| | | GTCATCACTGGCATCTTTTTTGATCATTGCACCATCATCAAATGCATTGGG |
| | | ATAACCATGACTGAAGCCACAGGAGCCAAGAGCAGGAGGACCAAGGCC |
| | | CTGGCGAAGGCCGTGGCCTCGAATATAGTCTTCTCCCTCGCTTGTGCAGG |
| | | TCCCAATGGAGCGAGGGATAGGACTATACTCGGGGACGCGGGCCTGGA |
| | | CGCCGGCATCCGGGCTCAGGACCCCCCTCTCTGCCAGAGGC |
| | | (SEQ ID NO: 281) |
| PD1 + PD1 | miR204 + | AGGAGGGTGGGGGTGGAGGCAAGCAGAGGACTTCCTGATCGCGTACCC |
| | miR206 | ATGGCTACAGTCTTTCTTCATGTGACTCGTGGACTTCAGGAATGGGTTCC |
| | | AAGGATGAGAATATATGAAGGATCCTGGAAGCTATTCCTGACGTTCAATT |
| | | GTCATCACTGGCATCTTTTTTGATCATTGCACCATCATCAAATGCATTGGG |
| | | ATAACCATGACGATGCTACAAGTGGCCCACTTCTGAGATGCGGGCTGCTT |
| | | CTGGATGACACTGCTTCCCGAGGCCTGTGGTTCTGTTATATCCATATATG |
| | | GATTACTTTGCTATATAATATAATAGAACCACAGGTTTCGGCAAGTGCCT |
| | | CCTCGCTGGCCCCAGGGTACCACCCGGAGCACAGGTTTGGTGACCTT |
| | | (SEQ ID NO: 282) |
| PD1 + CTLA4 | miR206 + | GATGCTACAAGTGGCCCACTTCTGAGATGCGGGCTGCTTCTGGATGACA |
| | miR26a | CTGCTTCCCGAGGCCTGTGGTTCTGTTATATCCATATATGGATTACTTTGC |
| | | TATATAATATAATAGAACCACAGGTTTCGGCAAGTGCCTCCTCGCTGGCC |
| | | CCAGGGTACCACCCGGAGCACAGGTTTGGTGACCTTTGAAGCCACAGGA |
| | | GCCAAGAGCAGGAGGACCAAGGCCCTGGCGAAGGCCGTGGCCTCGAAT |
| | | ATAGTCTTCTCCCTCGCTTGTGCAGGTCCCAATGGAGCGAGGGATAGGA |
| | | CTATACTCGGGGACGCGGGCCTGGACGCCGGCATCCGGGCTCAGGACCC |
| | | CCCTCTCTGCCAGAGGC |
| | | (SEQ ID NO: 283) |
| PD1 + CTLA4 | miR206 + | GATGCTACAAGTGGCCCACTTCTGAGATGCGGGCTGCTTCTGGATGACA |
| | miR204 | CTGCTTCCCGAGGCCTGTGGTTCTGTTATATCCATATATGGATTACTTTGC |
| | | TATATAATATAATAGAACCACAGGTTTCGGCAAGTGCCTCCTCGCTGGCC |
| | | CCAGGGTACCACCCGGAGCACAGGTTTGGTGACCTTAGGAGGGTGGGG |
| | | GTGGAGGCAAGCAGAGGACTTCCTGATCGCGTACCCATGGCTACAGTCT |
| | | TTCTTCATGTGACTCGTGGACAATATAGTCTTCTCCCTCGCTTGAGAATAT |
| | | ATGAAGGAAGCAGGGACAGGACTATATTGTTCAATTGTCATCACTGGCA |
| | | TCTTTTTTGATCATTGCACCATCATCAAATGCATTGGGATAACCATGAC |
| | | (SEQ ID NO: 284) |
| TIGIT + | miR17 + | TTAGCAGGAAAAAAGAGAACATCACCTTGTAAAACTGAAGATTGTGACC |
| CTLA4 | miR26a | AGTCAGAATAATGTAGATCCACGTTACTCACCCTAGTGATATGTGCATCT |
| | | AGGGTGTGTCATGTGGATGAAGCATTATGGTGACAGCTGCCTCGGGAAG |
| | | CCAAGTTGGGCTTTAAAGTGCAGGGCCTGCTGATGTTGAAGCCACAGGA |
| | | GCCAAGAGCAGGAGGACCAAGGCCCTGGCGAAGGCCGTGGCCTCGAAT |
| | | ATAGTCTTCTCCCTCGCTTGTGCAGGTCCCAATGGAGCGAGGGATAGGA |
| | | CTATACTCGGGGACGCGGGCCTGGACGCCGGCATCCGGGCTCAGGACCC |
| | | CCCTCTCTGCCAGAGGC |
| | | (SEQ ID NO: 285) |
| TIGIT + | miR17 + | TTAGCAGGAAAAAAGAGAACATCACCTTGTAAAACTGAAGATTGTGACC |
| CTLA4 | miR204 | AGTCAGAATAATGTAGATCCACGTTACTCACCCTAGTGATATGTGCATCT |
| | | AGGGTGTGTCATGTGGATGAAGCATTATGGTGACAGCTGCCTCGGGAAG |
| | | CCAAGTTGGGCTTTAAAGTGCAGGGCCTGCTGATGTAGGAGGGTGGGG |
| | | GTGGAGGCAAGCAGAGGACTTCCTGATCGCGTACCCATGGCTACAGTCT |
| | | TTCTTCATGTGACTCGTGGACAATATAGTCTTCTCCCTCGCTTGAGAATAT |
| | | ATGAAGGAAGCAGGGACAGGACTATATTGTTCAATTGTCATCACTGGCA |
| | | TCTTTTTTGATCATTGCACCATCATCAAATGCATTGGGATAACCATGAC |
| | | (SEQ ID NO: 286) |
| TIGIT + PD1 | miR17 + | TTAGCAGGAAAAAAGAGAACATCACCTTGTAAAACTGAAGATTGTGACC |
| | miR204 | AGTCAGAATAATGTAGATCCACGTTACTCACCCTAGTGATATGTGCATCT |
| | | AGGGTGTGTCATGTGGATGAAGCATTATGGTGACAGCTGCCTCGGGAAG |
| | | CCAAGTTGGGCTTTAAAGTGCAGGGCCTGCTGATGTAGGAGGGTGGGG |
| | | GTGGAGGCAAGCAGAGGACTTCCTGATCGCGTACCCATGGCTACAGTCT |
| | | TTCTTCATGTGACTCGTGGACTTCAGGAATGGGTTCCAAGGATGAGAATA |
| | | TATGAAGGATCCTGGAAGCTATTCCTGACGTTCAATTGTCATCACTGGCA |
| | | TCTTTTTTGATCATTGCACCATCATCAAATGCATTGGGATAACCATGAC |
| | | (SEQ ID NO: 287) |
| TIGIT + PD1 | miR17 + | TTAGCAGGAAAAAAGAGAACATCACCTTGTAAAACTGAAGATTGTGACC |
| | 206 | AGTCAGAATAATGTAGATCCACGTTACTCACCCTAGTGATATGTGCATCT |
| | | AGGGTGTGTCATGTGGATGAAGCATTATGGTGACAGCTGCCTCGGGAAG |
| | | CCAAGTTGGGCTTTAAAGTGCAGGGCCTGCTGATGTGATGCTACAAGTG |
| | | GCCCACTTCTGAGATGCGGGCTGCTTCTGGATGACACTGCTTCCCGAGGC |
| | | CTGTGGTTCTGTTATATCCATATATGGATTACTTTGCTATATAATATAATA |
| | | GAACCACAGGTTTCGGCAAGTGCCTCCTCGCTGGCCCCAGGGTACCACCC |
| | | GGAGCACAGGTTTGGTGACCTT |
| | | (SEQ ID NO: 288) |
| TIGIT + | miR204 + | AGGAGGGTGGGGGTGGAGGCAAGCAGAGGACTTCCTGATCGCGTACCC |
| CTLA4 | miR26a | ATGGCTACAGTCTTTCTTCATGTGACTCGTGGACAGATCCACGTTACTCAC |
| | | CCCCTGAGAATATATGAAGGAGGGGTGAGAAGCGTGGATCCGTTCAATT |
| | | GTCATCACTGGCATCTTTTTTGATCATTGCACCATCATCAAATGCATTGGG |
| | | ATAACCATGACTGAAGCCACAGGAGCCAAGAGCAGGAGGACCAAGGCC |
| | | CTGGCGAAGGCCGTGGCCTCGAATATAGTCTTCTCCCTCGCTTGTGCAGG |
| | | TCCCAATGGAGCGAGGGATAGGACTATACTCGGGGACGCGGGCCTGGA |
| | | CGCCGGCATCCGGGCTCAGGACCCCCCTCTCTGCCAGAGGC |
| | | (SEQ ID NO: 289) |
| TIGIT + PD1 | miR204 + | AGGAGGGTGGGGGTGGAGGCAAGCAGAGGACTTCCTGATCGCGTACCC |
| | miR206 | ATGGCTACAGTCTTTCTTCATGTGACTCGTGGACAGATCCACGTTACTCAC |
| | | CCCCTGAGAATATATGAAGGAGGGGTGAGAAGCGTGGATCCGTTCAATT |
| | | GTCATCACTGGCATCTTTTTTGATCATTGCACCATCATCAAATGCATTGGG |
| | | ATAACCATGACGATGCTACAAGTGGCCCACTTCTGAGATGCGGGCTGCTT |
| | | CTGGATGACACTGCTTCCCGAGGCCTGTGGTTCTGTTATATCCATATATG |
| | | GATTACTTTGCTATATAATATAATAGAACCACAGGTTTCGGCAAGTGCCT |
| | | CCTCGCTGGCCCCAGGGTACCACCCGGAGCACAGGTTTGGTGACCTT |
| | | (SEQ ID NO: 290) |

[0815] Splice donor and splice acceptor site sequences

| | |
|---|---|
| 5′ side of intron | AGGTAAGAGTCGATCG (SEQ ID NO: 291) |
| (SEQ ID NO: 291) | |
| 3′ side of intron | ACGCGTTACTAACTGGTACCTCTTTTTTTTTT |
| (SEQ ID NO: 292) | TTGATATCCTGCAGGC (SEQ ID NO: 292) |

[0816] Additional miRNA Sequences

| | SEQ |
|---|---|
| | ID |
| Mature miRNA_Length (Sequence) | NO: |
| Guide PD1_204_21nt (TTCAGGAATGGGTTCCAAGGA) | 704 |
| Guide PD1_204_23nt (TTCAGGAATGGGTTCCAAGGATG) | 705 |
| Passenger PD1_204_21nt (TCCTGGAAGCTATTCCTGACG) | 706 |
| Passenger PD1_204_22nt (TCCTGGAAGCTATTCCTGACG | 707 |
| T) | |
| Passenger PD1_204_23nt (TCCTGGAAGCTATTCCTGACG | 708 |
| TT) | |
| Guide PD1_206_21nt (TATAATATAATAGAACCACAG) | 709 |
| Guide PD1_206_23nt (TATAATATAATAGAACCACAGGA) | 710 |
| Passenger PD1_206_21nt (TGTGGTTCTGTTATATCCATA) | 711 |
| Passenger PD1_206_22nt (TGTGGTTCTGTTATATCCATA | 712 |
| T) | |
| Passenger PD1_206_23nt (TGTGGTTCTGTTATATCCATA | 713 |
| TA) | |

[0817] Exemplary anti-CD33 VH and VL Sequences

| | SEQ | Amino Acid | SEQ | |
|---|---|---|---|---|
| Name | ID NO | Sequence | ID NO | Nucleotide Sequence |
| hM195 VL | 293 | DIQMTQSPSSLSASVG | 301 | GACATTCAGATGACCCAGTCTCCGAGCTCTCTGTC |
| | | DRVTITCRASESVDNY | | CGCATCAGTAGGAGACAGGGTCACCATCACATGC |
| | | GISFMNWFQQKPGKA | | AGAGCCAGCGAAAGTGTCGACAATTATGGCATTA |
| | | PKLLIYAASNQGSGVPS | | GCTTTATGAACTGGTTCCAACAGAAACCCGGGAA |
| | | RFSGSGSGTDFTLTISSL | | GGCTCCTAAGCTTCTGATTTACGCTGCATCCAACC |
| | | QPDDFATYYCQQSKEV | | AAGGCTCCGGGGTACCCTCTCGCTTCTCAGGCAG |
| | | PWTFGQGTKVEIK | | TGGATCTGGGACAGACTTCACTCTCACCATTTCAT |
| | | | | CTCTGCAGCCTGATGACTTCGCAACCTATTACTGT |
| | | | | CAGCAAAGTAAGGAGGTTCCGTGGACGTTCGGTC |
| | | | | AAGGGACCAAGGTGGAGATCAAA |
| hM195 VH | 294 | QVQLVQSGAEVKKPGS | 302 | CAGGTTCAGCTGGTGCAGTCTGGAGCTGAGGTG |
| | | SVKVSCKASGYTFTDY | | AAGAAGCCTGGGAGCTCAGTGAAGGTTTCCTGCA |
| | | NMHWVRQAPGQGLE | | AAGCTTCTGGCTACACCTTCACTGACTACAACATG |
| | | WIGYIYPYNGGTGYNQ | | CACTGGGTGAGGCAGGCTCCTGGCCAAGGCCTG |
| | | KFKSKATITADESTNTA | | GAATGGATTGGATATATTTATCCTTACAATGGTG |
| | | YMELSSLRSEDTAVYYC | | GTACCGGCTACAACCAGAAGTTCAAGAGCAAGG |
| | | ARGRPAMDYWGQGT | | CCACAATTACAGCAGACGAGAGTACTAACACAGC |
| | | LVTVSS | | CTACATGGAACTCTCCAGCCTGAGGTCTGAGGAC |
| | | | | ACTGCAGTCTATTACTGCGCAAGAGGGCGCCCCG |
| | | | | CTATGGACTACTGGGGCCAAGGGACTCTGGTCAC |
| | | | | TGTCTCTTCA |
| M2H12 VH | 295 | QVQLQQSGPELVRPGT | | |
| | | FVKISCKASGYTFTNYDI | | |
| | | NWVNQRPGQGLEWI | | |
| | | GWIYPGDGSTKYNEKF | | |
| | | KAKATLTADKSSSTAYL | | |
| | | QLNNLTSENSAVYFCA | | |
| | | SGYEDAMDYWGQGT | | |
| | | SVTVSS | | |
| M2H12 VL | 296 | DIKMTQSPSSMYASLG | | |
| | | ERVIINCKASQDINSYLS | | |
| | | WFQQKPGKSPKTLIYR | | |
| | | ANRLVDGVPSRFSGSG | | |
| | | SGQDYSLTISSLEYEDM | | |
| | | GIYYCLQYDEFPLTFGA | | |
| | | GTKLELKR | | |
| DRB2 VH | 297 | EVKLQESGPELVKPGAS | | |
| | | VKMSCKASGYKFTDYV | | |
| | | VHWLKQKPGQGLEWI | | |
| | | GYINPYNDGTKYNEKF | | |
| | | KGKATLTSDKSSSTAY | | |
| | | MEVSSLTSEDSAVYYC | | |
| | | ARDYRYEVYGMDYWG | | |
| | | QGTSVTVSS | | |
| DRB2 VL | 298 | DIVLTQSPTIMSASPGE | | |
| | | RVTMTCTASSSVNYIH | | |
| | | WYQQKSGDSPLRWIF | | |
| | | DTSKVASGVPARFSGS | | |
| | | GSGTSYSLTISTMEAED | | |
| | | AATYYCQQWRSYPLTF | | |
| | | GDGTRLELKRADAAPT | | |
| | | VS | | |
| My9-6 VH | 299 | QVQLQQPGAEVVKPG | | |
| | | ASVKMSCKASGYTFTS | | |
| | | YYIHWIKQTPGQGLEW | | |
| | | VGVIYPGNDDISYNQK | | |
| | | FKGKATLTADKSSTTAY | | |
| | | MQLSSLTSEDSAVYYC | | |
| | | AREVRLRYFDVWGAG | | |
| | | TTVTVSS | | |
| My9-6 VL | 300 | NIMLTQSPSSLAVSAG | | |
| | | EKVTMSCKSSQSVFFSS | | |
| | | SQKNYLAWYQQIPGQ | | |
| | | SPKLLIYWASTRESGVP | | |
| | | DRFTGSGSGTDFTLTIS | | |
| | | SVQSEDLAIYYCHQYLS | | |
| | | SRTFGGGTKLEIKR | | |
| hM195 | 303 | DIQMTQSPSSLSA | 304 | GACATTCAGATGACCCAGTCTCCGAGCTCTCTGTC |
| scFv | | SVGDRVTITCRAS | | CGCATCAGTAGGAGACAGGGTCACCATCACATGC |
| | | ESVDNYGISFMN | | AGAGCCAGCGAAAGTGTCGACAATTATGGCATTA |
| | | WFQQKPGKAPKL | | GCTTTATGAACTGGTTCCAACAGAAACCCGGGAA |
| | | LIYAASNQGSGVP | | GGCTCCTAAGCTTCTGATTTACGCTGCATCCAACC |
| | | SRFSGSGSGTDFT | | AAGGCTCCGGGGTACCCTCTCGCTTCTCAGGCAG |
| | | LTISSLQPDDFATY | | TGGATCTGGGACAGACTTCACTCTCACCATTTCAT |
| | | YCQQSKEVPWTF | | CTCTGCAGCCTGATGACTTCGCAACCTATTACTGT |
| | | GQGTKVEIKGGGG | | CAGCAAAGTAAGGAGGTTCCGTGGACGTTCGGTC |
| | | SGGGGSGGGGSQ | | AAGGGACCAAGGTGGAGATCAAAGGTGGCGGTG |
| | | VQLVQSGAEVKKP | | GCTCGGGCGGTGGTGGGTCGGGTGGCGGCGGAT |
| | | GSSVKVSCKASGY | | CTCAGGTTCAGCTGGTGCAGTCTGGAGCTGAGGT |
| | | TFTDYNMHWVRQ | | GAAGAAGCCTGGGAGCTCAGTGAAGGTTTCCTGC |
| | | APGQGLEWIGYIY | | AAAGCTTCTGGCTACACCTTCACTGACTACAACAT |
| | | PYNGGTGYNQKF | | GCACTGGGTGAGGCAGGCTCCTGGCCAAGGCCT |
| | | KSKATITADESTNT | | GGAATGGATTGGATATATTTATCCTTACAATGGT |
| | | AYMELSSLRSEDT | | GGTACCGGCTACAACCAGAAGTTCAAGAGCAAG |
| | | AVYYCARGRPAM | | GCCACAATTACAGCAGACGAGAGTACTAACACAG |
| | | DYWGQGTLVTVSS | | CCTACATGGAACTCTCCAGCCTGAGGTCTGAGGA |
| | | | | CACTGCAGTCTATTACTGCGCAAGAGGGCGCCCC |
| | | | | GCTATGGACTACTGGGGCCAAGGGACTCTGGTCA |
| | | | | CTGTCTCTTCA |

[0818] Exemplary anti-MUC1 VH and VL Sequences

| | SEQ ID | |
|---|---|---|
| Name | NO | Amino Acid Sequence |
| Anti-MUC1 | 305 | QVQLVQSGAEVKKPGSSVKVSCKASGYAFSNFWMNWVRQAPGQGLEWMGQI |
| VH1 | | YPGDGDTNYNGKFKGRVTITADKSTSTAYMELSSLRSEDTAVYYCARSYYRSAWFA |
| | | YWGQGTLVTVSS |
| Anti-MUC1 | 306 | QVQLVQSGAEVKKPGASVKVSCKASGYAFSNFWMNWVRQAPGQGLEWMGQI |
| VH2 | | YPGDGDTNYNGKFKGRVTMTRDTSTSTVYMELSSLRSEDTAVYYCARSYYRSAWF |
| | | AYWGQGTLVTVSS |
| Anti-MUC1 | 307 | QVQLVQSGAEVKKPGASVKVSCKASGYAFSNFWMNWVRQAPGQGLEWMGQI |
| VH3 | | YPGDGDTNYNGKFKGRVTMTRDTSISTAYMELSRLRSDDTAVYYCARSYYRSAWF |
| | | AYWGQGTLVTVSS |
| Anti-MUC1 | 308 | QVQLVQSGAEVKKPGATVKISCKVSGYAFSNFWMNWVQQAPGKGLEWMGQIY |
| VH4 | | PGDGDTNYNGKFKGRVTITADTSTDTAYMELSSLRSEDTAVYYCARSYYRSAWFAY |
| | | WGQGTLVTVSR |
| Anti-MUC1 | 309 | EVQLVQSGAEVKKPGESLKISCKGSGYAFSNFWMNWVRQMPGKGLEWMGQIY |
| VH5 | | PGDGDTNYNGKFKGQVTISADKSISTAYLQWSSLKASDTAMYYCARSYYRSAWFA |
| | | YWGQGTLVTVSL |
| Anti-MUC1 | 310 | EIVLTQSPDFQSVTPKEKVTITCRASQSIGTSIHWYQQKPDQSPKLLIKYASESISGVP |
| VL1 | | SRFSGSGSGTDFTLTINSLEAEDAATYYCQQSNNWPLTFGQGTKVEIK |
| Anti-MUC1 | 311 | EIVMTQSPATLSVSPGERATLSCRASQSIGTSIHWYQQKPGQAPRLLIYYASESISGI |
| VL2 | | PARFSGSGSGTEFTLTISSLQSEDFAVYYCQQSNNWPLTFGGGTKVEIK |
| Anti-MUC1 | 312 | EIVLTQSPATLSLSPGERATLSCRASQSIGTSIHWYQQKPGQAPRLLIYYASESISGIP |
| VL3 | | ARFSGSGSGTDFTLTISSLEPEDFAVYYCQQSNNWPLTFGGGTKVEIK |
| Anti-MUC1 | 313 | AIQLTQSPSSLSASVGDRVTITCRASQSIGTSIHWYQQKPGKAPKLLIYYASESISGVP |
| VL4 | | SRFSGSGSGTDFTLTISSLQPEDFATYYCQQSNNWPLTFGGGTKVEIK |
| Anti-MUC1 | 314 | DIVMTQSPSLLSASTGDRVTISCRASQSIGTSIHWYQQKPGKAPELLIYYASESISGV |
| VL5 | | PSRFSGSGSGTDFTLTISCLQSEDFATYYCQQSNNWPLTFGQGTKVEIK |

[0819] Exemplary anti-MUC16 Sequences

| | SEQ | Amino Acid | SEQ | |
|---|---|---|---|---|
| Name | ID NO | Sequence | ID NO | Nucleotide Sequence |
| Anti- | 315 | QVQLQESGPGLVKPS | 316 | CAGGTGCAACTGCAGGAATCAGGTCCAGGCTTG |
| MUC16 | | QTLSLTCTVSGYSIVSH | | GTCAAGCCATCGCAGACTCTTAGTCTGACATGCA |
| VH1 | | YYWSWIRQHPGKGLE | | CCGTGAGTGGCTATAGCATCGTGTCGCACTATTA |
| | | WIGYISSDGSNYYNPSL | | TTGGTCTTGGATCAGGCAGCATCCAGGAAAGGG |
| | | KSLVTISVDTSKNQFSL | | ACTGGAGTGGATCGGGTACATTAGCAGCGATGG |
| | | KLSSVTAADTAVYYCV | | GAGCAACTATTACAACCCATCTCTGAAGTCCCTGG |
| | | RGVDYWGQGTMVTV | | TAACTATTAGCGTGGATACAAGCAAAAATCAGTT |
| | | SS | | TTCATTAAAGCTCTCTTCAGTGACCGCAGCTGATA |
| | | | | CCGCCGTCTATTATTGCGTGCGGGGGGTGGACTA |
| | | | | CTGGGGTCAGGGCACCATGGTTACTGTGTCATCA |
| Anti- | 317 | QVQLQESGPGLVKPSD | 318 | CAGGTACAGCTGCAGGAGAGTGGCCCTGGTTTA |
| MUC16 | | TLSLTCAVSGYSIVSHY | | GTAAAGCCATCAGATACACTTTCACTTACCTGCGC |
| VH2 | | YWGWIRQPPGKGLE | | CGTGTCTGGTTATTCTATCGTGAGCCACTATTACT |
| | | WIGYISSDGSNYYNPSL | | GGGGATGGATCCGCCAGCCCCCTGGCAAAGGTCT |
| | | KSRVTMSVDTSKNQFS | | TGAGTGGATTGGCTATATAAGTTCGGATGGCAGT |
| | | LKLSSVTAVDTAVYYCV | | AACTATTACAATCCTTCTCTGAAGAGCCGTGTCAC |
| | | RGVDYWGQGTMVTV | | TATGAGCGTGGACACTAGCAAAAACCAGTTCAGC |
| | | SS | | CTGAAGCTGTCCTCCGTCACCGCCGTAGACACCG |
| | | | | CTGTCTACTATTGTGTTAGGGGGGTGGACTACTG |
| | | | | GGGCCAAGGCACCATGGTCACGGTGAGCAGC |
| Anti- | 319 | EVQLVESGGGLVQPG | 320 | |
| MUC16 | | GSLRLSCAASGYSIVSH | | |
| VH3 | | YYMSWVRQAPGKGLE | | |
| | | WVSVISSDGSNYYADS | | |
| | | VKGRFTISRDNSKNTLY | | |
| | | LQMNSLRAEDTAVYYC | | |
| | | VRGVDYWGQGTLVTV | | |
| | | SS | | |
| Anti- | 321 | EVQLVESGGGLVQPG | 322 | GAGGTGCAGCTCGTCGAGTCCGGAGGCGGTCTG |
| MUC16 | | RSLRLSCAASGYSIVSH | | GTGCAACCCGGCCGTTCTTTGCGGCTGAGTTGCG |
| VH4 | | YYMHWVRQAPGKGL | | CTGCCAGTGGGTATAGCATCGTGAGTCACTATTA |
| | | EWVSAISSDGSNEYAD | | CATGCATTGGGTTCGTCAAGCCCCTGGCAAGGGA |
| | | SVEGRFTISRDNAKNSL | | CTAGAGTGGGTGTCCGCCATCTCCTCAGACGGTA |
| | | YLQMNSLRAEDTAVYY | | GTAATGAGTACGCGGACAGCGTAGAGGGTAGAT |
| | | CVRGVDYWGQGTLVT | | TCACCATTTCTCGGGACAATGCCAAAAATAGTCTA |
| | | VSS | | TACCTCCAAATGAATTCCCTTAGGGCCGAAGACA |
| | | | | CTGCCGTGTACTACTGTGTTCGGGGCGTGGACTA |
| | | | | CTGGGGGCAGGGGACATTGGTGACTGTGAGCTC |
| | | | | A |
| Anti- | 323 | QVQLQESGPGLVKPS | 324 | CAGGTCCAACTGCAGGAATCTGGCCCCGGACTGG |
| MUC16 | | QTLSLTCTVSGYSIVSH | | TTAAACCATCTCAGACACTCTCCCTGACCTGCACC |
| VH5 | | YYWSWIRQHPGKGLE | | GTGTCTGGATACAGCATCGTTTCTCATTATTACTG |
| | | WIGYISSDGSNEYNPSL | | GTCATGGATTAGGCAGCATCCCGGAAAAGGGCTT |
| | | KSLVTISVDTSKNQFSL | | GAATGGATTGGCTACATCTCCTCCGACGGCTCCA |
| | | KLSSVTAADTAVYFCV | | ATGAGTACAACCCATCACTTAAATCTCTGGTCACG |
| | | RGVDYWGQGTMVTV | | ATAAGCGTAGACACATCTAAAAATCAGTTCTCATT |
| | | SS | | AAAGCTCAGCTCTGTTACAGCTGCCGACACCGCT |
| | | | | GTGTACTTCTGTGTGCGAGGGGTTGACTACTGGG |
| | | | | GGCAGGGCACAATGGTGACAGTGTCTTCC |
| Anti- | 325 | QVQLVQSGAEVKKPG | 326 | CAGGTTCAACTGGTTCAGTCCGGAGCCGAGGTCA |
| MUC16 | | SSVKVSCKASGYSIVSH | | AAAAGCCTGGATCCTCTGTGAAGGTGTCATGTAA |
| VH6 | | YYISWVRQAPGQGLE | | GGCTTCTGGCTACAGCATCGTCTCACATTATTACA |
| | | WMGGISSDGSNNYA | | TATCTTGGGTGCGACAGGCCCCCGGCCAGGGGCT |
| | | QKFQGRVTITADESTS | | CGAGTGGATGGGAGGTATTTCCTCCGACGGGAG |
| | | TAYMELSSLRS | | TAACAATTACGCTCAGAAATTTCAGGGCCGGGTG |
| | | EDTAVYYCVRGVDYW | | ACCATTACCGCCGACGAAAGTACAAGCACCGCTT |
| | | GQGTLVTVSS | | ATATGGAATTAAGCTCTTTAAGATCAGAGGACAC |
| | | | | GGCTGTGTACTACTGTGTAAGGGGCGTGGATTAC |
| | | | | TGGGGTCAGGGGACGCTCGTCACCGTCTCGAGC |
| Anti- | 327 | QVQLQESGPGLVKPSE | 328 | CAGGTCCAGCTCCAGGAATCCGGCCCAGGGTTGG |
| MUC16 | | TLSLTCTVSGYSIVSHYY | | TGAAGCCTTCGGAGACCCTGTCTCTGACATGCAC |
| VH7 | | WSWIRQPPGKGLEWI | | AGTCAGCGGCTATAGTATCGTCTCCCACTATTATT |
| | | GYISSDGSNNYNPSLKS | | GGTCTTGGATTCGGCAACCTCCAGGCAAGGGGTT |
| | | RVTISVDTSKNQFSLKL | | AGAATGGATTGGATACATCTCAAGCGATGGGTCC |
| | | SSVTAADTAVYYCVRG | | AATAACTACAACCCAAGTCTCAAAAGTAGAGTGA |
| | | VDYWGQGTTVTVSS | | CTATCTCTGTGGATACCAGTAAAAACCAGTTTTCA |
| | | | | CTCAAGTTGAGTTCCGTCACCGCCGCCGACACAG |
| | | | | CCGTTTACTACTGTGTTCGGGGAGTGGACTACTG |
| | | | | GGGCCAAGGTACCACGGTTACCGTGAGCAGC |
| Anti- | 648 | QVQLQESGPGLVKPSD | 649 | CAGGTGCAGCTGCAGGAGAGCGGCCCCGGCCTG |
| MUC16 | | TLSLTCAVSGYSIVSHY | | GTGAAGCCCAGCGACACCCTGAGCCTGACCTGCG |
| VH8 | | YWHWIRQPPGKGLE | | CCGTGAGCGGCTACAGCATCGTGAGCCACTACTA |
| | | WMGYISSDGSNDFNP | | CTGGCACTGGATCAGACAGCCCCCCGGCAAGGG |
| | | SLKTRITISRDTSKNQFS | | CCTGGAGTGGATGGGCTACATCAGCAGCGACGG |
| | | LKLSSVTAVDTAVYYCV | | CAGCAACGACTTCAACCCCAGCCTGAAGACCAGA |
| | | RGVDYWGQGTLVTVSS | | ATCACCATCAGCAGAGACACCAGCAAGAACCAGT |
| | | | | TCAGCCTGAAGCTGAGCAGCGTGACCGCCGTGG |
| | | | | ACACCGCCGTGTACTACTGCGTGAGAGGCGTGGA |
| | | | | CTACTGGGGCCAGGGCACCCTGGTGACCGTGAG |
| | | | | CAGC |
| Anti- | 650 | QVQLQESGPGLVKPS | 651 | CAGGTGCAGCTGCAGGAGAGCGGCCCCGGCCTG |
| MUC16 | | QTLSLTCAVYGYSIVSH | | GTGAAGCCCAGCCAGACCCTGAGCCTGACCTGCG |
| VH9 | | YYWSWIRQPPGKGLE | | CCGTGTACGGCTACAGCATCGTGAGCCACTACTA |
| | | WIGEISSDGSNNYNPS | | CTGGAGCTGGATCAGACAGCCCCCCGGCAAGGG |
| | | LKSRVTISVDTSKNQFS | | CCTGGAGTGGATCGGCGAGATCAGCAGCGACGG |
| | | LKLSSVTAADTAVYYCV | | CAGCAACAACTACAACCCCAGCCTGAAGAGCAGA |
| | | RGVDYWGQGTLVTVSS | | GTGACCATCAGCGTGGACACCAGCAAGAACCAGT |
| | | | | TCAGCCTGAAGCTGAGCAGCGTGACCGCCGCCGA |
| | | | | CACCGCCGTGTACTACTGCGTGAGAGGCGTGGAC |
| | | | | TACTGGGGCCAGGGCACCCTGGTGACCGTGAGC |
| | | | | AGC |
| Anti- | 652 | QVQLQESGPGLVKPSE | 653 | CAGGTGCAGCTGCAGGAGAGCGGCCCCGGCCTG |
| MUC16 | | TLSLTCAVSGYSIVSHY | | GTGAAGCCCAGCGAGACCCTGAGCCTGACCTGCG |
| VH10 | | YWGWIRQPPGKGLE | | CCGTGAGCGGCTACAGCATCGTGAGCCACTACTA |
| | | WIGSISSDGSNYYNPSL | | CTGGGGCTGGATCAGACAGCCCCCCGGCAAGGG |
| | | KSRVTISVDTSKNQFSL | | CCTGGAGTGGATCGGCAGCATCAGCAGCGACGG |
| | | KLSSVTAADTAVYYCV | | CAGCAACTACTACAACCCCAGCCTGAAGAGCAGA |
| | | RGVDYWGQGTLVTVSS | | GTGACCATCAGCGTGGACACCAGCAAGAACCAGT |
| | | | | TCAGCCTGAAGCTGAGCAGCGTGACCGCCGCCGA |
| | | | | CACCGCCGTGTACTACTGCGTGAGAGGCGTGGAC |
| | | | | TACTGGGGCCAGGGCACCCTGGTGACCGTGAGC |
| | | | | AGC |
| Anti- | 654 | QVQLVESGGGVVQPG | 655 | CAGGTGCAGCTGGTGGAGAGCGGCGGCGGCGT |
| MUC16 | | RSLRLSCAASGYSIVSH | | GGTGCAGCCCGGCAGAAGCCTGAGACTGAGCTG |
| VH11 | | YYWNWVRQAPGKGL | | CGCCGCCAGCGGCTACAGCATCGTGAGCCACTAC |
| | | EWVAYISSDGSNEYNP | | TACTGGAACTGGGTGAGACAGGCCCCCGGCAAG |
| | | SLKNRFTISRDNSKNTL | | GGCCTGGAGTGGGTGGCCTACATCAGCAGCGAC |
| | | YLQMNSLRAEDTAVYY | | GGCAGCAACGAGTACAACCCCAGCCTGAAGAAC |
| | | CVRGVDYWGQGTTVT | | AGATTCACCATCAGCAGAGACAACAGCAAGAACA |
| | | VSS | | CCCTGTACCTGCAGATGAACAGCCTGAGAGCCGA |
| | | | | GGACACCGCCGTGTACTACTGCGTGAGAGGCGT |
| | | | | GGACTACTGGGGCCAGGGCACCACCGTGACCGT |
| | | | | GAGCAGC |
| Anti- | 656 | QVQLQESGPGLVKPS | 657 | CAGGTGCAGCTGCAGGAGAGCGGCCCCGGCCTG |
| MUC16 | | QTLSLTCTVSGYSIVSH | | GTGAAGCCCAGCCAGACCCTGAGCCTGACCTGCA |
| VH12 | | YYWNWIRQHPGKGLE | | CCGTGAGCGGCTACAGCATCGTGAGCCACTACTA |
| | | WIGYISSDGSNEYNPSL | | CTGGAACTGGATCAGACAGCACCCCGGCAAGGG |
| | | KNLVTISVDTSKNQFSL | | CCTGGAGTGGATCGGCTACATCAGCAGCGACGG |
| | | KLSSVTAADTAVYYCV | | CAGCAACGAGTACAACCCCAGCCTGAAGAACCTG |
| | | RGVDYWGQGTMVTV | | GTGACCATCAGCGTGGACACCAGCAAGAACCAGT |
| | | SS | | TCAGCCTGAAGCTGAGCAGCGTGACCGCCGCCGA |
| | | | | CACCGCCGTGTACTACTGCGTGAGAGGCGTGGAC |
| | | | | TACTGGGGCCAGGGCACCATGGTGACCGTGAGC |
| | | | | AGC |
| Anti- | 658 | QVQLQESGPGLVKPSD | 659 | CAGGTGCAGCTGCAGGAGAGCGGCCCCGGCCTG |
| MUC16 | | TLSLTCAVSGYSIVSHY | | GTGAAGCCCAGCGACACCCTGAGCCTGACCTGCG |
| VH13 | | YWNWIRQPPGKGLE | | CCGTGAGCGGCTACAGCATCGTGAGCCACTACTA |
| | | WIGYISSDGSNEYNPSL | | CTGGAACTGGATCAGACAGCCCCCCGGCAAGGG |
| | | KNRVTMSVDTSKNQF | | CCTGGAGTGGATCGGCTACATCAGCAGCGACGG |
| | | SLKLSSVTAVDTAVYYC | | CAGCAACGAGTACAACCCCAGCCTGAAGAACAG |
| | | VRGVDYWGQGTMVT | | AGTGACCATGAGCGTGGACACCAGCAAGAACCA |
| | | VSS | | GTTCAGCCTGAAGCTGAGCAGCGTGACCGCCGTG |
| | | | | GACACCGCCGTGTACTACTGCGTGAGAGGCGTG |
| | | | | GACTACTGGGGCCAGGGCACCATGGTGACCGTG |
| | | | | AGCAGC |
| Anti- | 660 | EVQLLESGGGLVQPGG | 661 | GAGGTGCAGCTGCTGGAGAGCGGCGGCGGCCTG |
| MUC16 | | SLRLSCAASGYSIVSHY | | GTGCAGCCCGGCGGCAGCCTGAGACTGAGCTGC |
| VH14 | | YWNWVRQAPGKGLE | | GCCGCCAGCGGCTACAGCATCGTGAGCCACTACT |
| | | WVSYISSDGSNEYNPS | | ACTGGAACTGGGTGAGACAGGCCCCCGGCAAGG |
| | | LKNRFTISRDNSKNTLY | | GCCTGGAGTGGGTGAGCTACATCAGCAGCGACG |
| | | LQMNSLRAEDTAVYYC | | GCAGCAACGAGTACAACCCCAGCCTGAAGAACA |
| | | VRGVDYWGQGTLVTV | | GATTCACCATCAGCAGAGACAACAGCAAGAACAC |
| | | SS | | CCTGTACCTGCAGATGAACAGCCTGAGAGCCGAG |
| | | | | GACACCGCCGTGTACTACTGCGTGAGAGGCGTG |
| | | | | GACTACTGGGGCCAGGGCACCCTGGTGACCGTG |
| | | | | AGCAGC |
| Anti- | 672 | VKLQESGGGFVKPGG | 673 | GTGAAGCTGCAAGAGTCCGGCGGAGGCTTTG |
| MUC16 | | SLKVSCAASGFTFSSY | | TGAAGCCTGGCGGCTCTCTGAAAGTGTCCTGT |
| VH | | AMSWVRLSPEMRLE | | GCCGCCAGCGGCTTCACCTTTAGCAGCTACGCC |
| | | WVATISSAGGYIFYSD | | ATGAGCTGGGTCCGACTGAGCCCTGAGATGAG |
| | | SVQGRFTISRDNAKN | | ACTGGAATGGGTCGCCACCATCAGTAGCGCAGG |
| | | TLHLQMGSLRSGDTA | | CGGCTACATCTTCTACAGCGACTCTGTGCAGGGC |
| | | MYYCARQGFGNYGDY | | AGATTCACCATCAGCCGGGACAACGCCAAGAAC |
| | | YAMDYWGQGTTVTV | | ACCCTGCACCTCCAGATGGGCAGTCTGAGAAGC |
| | | SS | | GGCGATACCGCCATGTACTACTGCGCCAGACAA |
| | | | | GGCTTCGGCAACTACGGCGACTACTATGCCATG |
| | | | | GATTACTGGGGCCAGGGCACCACCGTGACAGT |
| | | | | CTCTTCT |
| Anti- | 674 | VKLEESGGGFVKPGG | 675 | GTGAAGCTGGAAGAGTCCGGCGGAGGCTTTG |
| MUC16 | | SLKISCAASGFTFRNY | | TGAAGCCTGGCGGAAGCCTGAAGATCAGCTGTG |
| VH | | AMSWVRLSPEMRL | | CCGCCAGCGGCTTCACCTTCAGAAACTACGCC |
| | | EWVATISSAGGYIFY | | ATGAGCTGGGTCCGACTGAGCCCCGAGATGAGA |
| | | SDSVQGRFTISRDNA | | CTGGAATGGGTCGCCACAATCAGCAGCGCAGGC |
| | | KNTHLQMGSLRSGD | | GGCTACATCTTCTACAGCGATAGCGTGCAGGGC |
| | | TAMYYCARQGFGNY | | AGATTCACCATCAGCCGGGACAACGCCAAGAA |
| | | GDYYAMDYWGQGT | | CACCCTGCACCTCCAGATGGGC |
| | | TVTVSS | | AGTCTGAGATCTGGCGACACCGCCATGTACTACT |
| | | | | GGCCAGACAAGGCTTCGGCAACTACGGCGACTA |
| | | | | CTATGCCATGGATTACTGGGGCCAGGGCACCAC |
| | | | | CGTGACAGTCTCTTCT |
| Anti- | 676 | DVQLLESGPGLVRPS | 677 | GACGTGCAACTTCTGGAGAGCGGGCCAGGGCT |
| MUC16 | | QSLSLTCSVTGYSIVSH | | AGTCAGGCCCTCCCAGTCGCTTTCACTGACTTG |
| VH | | YYWNWIRQFPGNKLE | | CAGTGTGACCGGTTACTCTATTGTGAGTCACTA |
| | | WMGYISSDGSNEYNP | | CTATTGGAACTGGATTCGGCAGTTCCCAGGCA |
| | | SLKNRISISLDTSKNQF | | ACAAACTGGAATGGATGGGGTACATATCTTCC |
| | | FLKFDFVTTADTATYF | | GATGGCTCGAATGAATATAACCCATCATTGAAA |
| | | CVRGVDYWGQGTTLT | | AATCGTATTTCCATCAGTCTGGATACGAGTAA |
| | | VSS | | AAACCAGTTTTTCCTCAAATTCGATTTCGTGAC |
| | | | | TACAGCAGATACTGCCACATACTTCTGTGTAC |
| | | | | GAGGTGTCGATTATTGGGGACAGGGCACAACG |
| | | | | CTGACCGTAAGTTCT |
| Anti- | 678 | DVQLQESGPGLVNPS | 679 | GACGTTCAGCTGCAAGAGTCTGGCCCTGGCCT |
| MUC16 | | QSLSLTCTVTGYSITN | | GGTCAATCCTAGCCAGAGCCTGAGCCTGACAT |
| VH | | DYAWNWIRQFPGNK | | GTACCGTGACCGGCTACAGCATCACCAACGAC |
| | | LEWMGYINYSGYTT | | TACGCCTGGAACTGGATCAGACAGTTCCCCGG |
| | | YNPSLKSRISITRDTS | | CAACAAGCTGGAATGGATGGGCTACATCAAC |
| | | KNQFFLHLNSVTTED | | TACAGCGGCTACACCACCTACAATCCCAGCCTG |
| | | TATYYCARWDGGLTY | | AAGTCCCGGATCTCCATCACCAGAGACACCAG |
| | | WGQGTLVTVSA | | CAAGAACCAGTTCTTCCTGCACCTGAACAGC |
| | | | | GTGACCACCGAGGATACCGCCACCTACTACTG |
| | | | | CGCTAGATGGGATGGCGGCCTGACATATTGGG |
| | | | | GCCAGGGAACACTGGTCACCGTGTCTGCT |
| Anti- | 680 | EVQLVESGGGLVQPG | 681 | GAGGTGCAGCTGGTGGAGAGCGGCGGCGGC |
| MUC16 | | GSLRLSCAASGYSITND | | CTGGTGCAGCCCGGCGGCAGCCTGAGGCTGAG |
| VH | | YAWNWVRQAPGKG | | CTGCGCCGCCAGCGGCTACAGCATCACCAACGA |
| | | LEWVGYINYSGYTTYN | | CTACGCCTGGAACTGGGTGAGGCAGGCCCCCG |
| | | PSLKSRFTISRDNSKNT | | GCAAGGGCCTGGAGTGGGTGGGCTACATCAA |
| | | LYLQMNSLRAEDTAV | | CTACAGCGGCTACACCACCTACAACCCCAGCCTG |
| | | YYCARWDGGLTYWG | | AAGAGCAGGTTCACCATCAGCAGGGACAACAGC |
| | | QGTLVTVSS | | AAGAACACCCTGTACCTGCAGATGAACAGCCTG |
| | | | | AGGGCCGAGGACACCGCCGTGTACTACTGCGC |
| | | | | CAGGTGGGACGGCGGCCTGACCTACTGGGGCC |
| | | | | AGGGCACCCTGGTGACCGTGAGCAGC |
| Anti- | 682 | EVQLVESGGGLVQPG | 683 | GAGGTGCAGCTGGTGGAGAGCGGCGGCGGC |
| MUC16 | | GSLRLSCAASGYSITND | | CTGGTGCAGCCCGGCGGCAGCCTGAGGCTGAG |
| VH | | YAWNWVRQAPGKG | | CTGCGCCGCCAGCGGCTACAGCATCACCAACGA |
| | | LEWVGYINYSGYTTYN | | CTACGCCTGGAACTGGGTGAGGCAGGCCCCCG |
| | | PSLKSRFTISRDNSKNT | | GCAAGGGCCTGGAGTGGGTGGGCTACATCAA |
| | | FYLQMNSLRAEDTAV | | CTACAGCGGCTACACCACCTACAACCCCAGCCTG |
| | | YYCARWDGGLTYWG | | AAGAGCAGGTTCACCATCAGCAGGGACAACAGC |
| | | QGTLVTVSS | | AAGAACACCTTCTACCTGCAGATGAACAGCCTG |
| | | | | AGGGCCGAGGACACCGCCGTGTACTACTGCGC |
| | | | | CAGGTGGGACGGCGGCCTGACCTACTGGGGCC |
| | | | | AGGGCACCCTGGTGACCGTGAGCAGC |
| Anti- | 684 | EVQLQQSGAELVKPG | 685 | GAGGTTCAGCTGCAGCAGTCTGGCGCCGAACTT |
| MUC16 | | ASVKLSCTASGFNIKD | | GTGAAACCTGGCGCCTCTGTGAAGCTGAGCTGT |
| VH | | TYMHWVKQRPEQGL | | ACCGCCAGCGGCTTCAACATCAAGGACACCTAC |
| | | EWIGRVDPANGNTK | | ATGCACTGGGTCAAGCAGAGGCCTGAGCAGGG |
| | | YDPKFQGKATLTADT | | CCTCGAATGGATCGGAAGAGTGGATCCCGCCA |
| | | SSNTAYLQLSSLTSEDT | | ACGGCAACACCAAATACGACCCCAAGTTCCAGG |
| | | AVYFCVRDYYGHTYG | | GCAAAGCCACACTGACCGCCGACACCTCTAGCA |
| | | FAFCDQGTTLTVSA | | ACACAGCCTACCTGCAGCTGTCCAGCCTGACCTC |
| | | | | TGAAGATACCGCCGTGTACTTCTGCGTGCGGGA |
| | | | | CTACTACGGCCATACCTACGGCTTCGCCTTCTGC |
| | | | | GACCAAGGCACAACCCTGACAGTGTCTGCT |
| Anti- | 686 | EVQLVESGGGLVQPG | 687 | GAGGTGCAGCTGGTTGAATCTGGCGGAGGACT |
| MUC16 | | GSLRLSCAASGFNIKD | | GGTTCAGCCTGGCGGATCTCTGAGACTGTCTTG |
| VH | | TYMHWVRQAPGKGL | | TGCCGCCAGCGGCTTCAACATCAAGGACACCTA |
| | | EWVGRVDPANGNTK | | CATGCACTGGGTCCGACAGGCCCCTGGCAAAGG |
| | | YDPKFQGRFTISADTS | | ACTTGAGTGGGTTGGAAGAGTGGACCCCGCCAA |
| | | KNTAYLQMNSLRAED | | CGGCAACACCAAATACGACCCCAAGTTCCAGGG |
| | | TAVYYCVRDYYGHTY | | CAGATTCACCATCAGCGCCGACACCAGCAAGAA |
| | | GFAFWGQGTLVTVSS | | CACCGCCTACCTGCAGATGAACAGCCTGAGAG |
| | | | | CCGAGGACACCGCCGTGTACTATTGCGTGCG |
| | | | | GGATTACTACGGCCATACCTACGGCTTCGCCT |
| | | | | TTTGGGGCCAGGGCACACTGGTTACCGTTAGCT |
| | | | | CT |
| Anti- | 329 | DIQMTQSPSSLSASVG | 330 | GACATACAGATGACTCAGAGCCCCTCCTCACTCTC |
| MUC16 | | DRVTITCQASRDINNFL | | GGCATCAGTCGGCGACAGGGTCACAATTACCTGT |
| VL1 | | NWYQQKPGKAPKLLIY | | CAGGCTTCTCGCGACATTAATAACTTCCTGAATTG |
| | | RANNLETGVPSRFSGS | | GTATCAGCAAAAGCCCGGGAAGGCCCCTAAGCT |
| | | GSGTDFTFTISSLQPED | | GTTGATTTATAGAGCAAATAATCTCGAAACCGGC |
| | | IATYFCLQYGDLYTFGG | | GTGCCCAGTAGGTTTAGCGGGTCCGGGAGCGGA |
| | | GTKVEIK | | ACAGACTTCACATTCACCATTTCTAGTTTGCAGCC |
| | | | | CGAAGACATTGCTACATATTTTTGCCTGCAGTACG |
| | | | | GGGATCTCTACACTTTCGGGGGCGGAACAAAGGT |
| | | | | TGAGATAAAA |
| Anti- | 331 | DIQMTQSPSSLSASVG | 332 | GATATTCAAATGACGCAGTCACCCTCATCGCTCTC |
| MUC16 | | DRVTITCQASRDINNFL | | TGCGTCAGTAGGGGATCGTGTCACGATAACCTGT |
| VL2 | | NWYQQKPGKAPKLLIY | | CAAGCATCAAGGGACATCAACAACTTCCTCAACT |
| | | RANNLETGVPSRFSGS | | GGTACCAACAGAAGCCTGGCAAGGCACCTAAACT |
| | | GSGTDFTFTISSLQPED | | CCTGATCTACCGGGCTAACAACCTAGAAACCGGG |
| | | IATYYCLQYGDLYTFGG | | GTTCCGAGCCGATTCAGTGGGTCTGGAAGCGGG |
| | | GTKVEIK | | ACAGACTTTACGTTCACTATTAGTTCGCTACAGCC |
| | | | | CGAAGACATTGCGACATATTACTGTCTTCAGTATG |
| | | | | GGGATTTGTATACCTTTGGGGGAGGCACCAAGGT |
| | | | | AGAGATAAAG |
| Anti- | 333 | DIQMTQSPSSLSASVG | 334 | GACATCCAGATGACTCAGAGCCCGTCTTCTCTATC |
| MUC16 | | DRVTITCRASRDINNFL | | CGCAAGTGTAGGCGATCGTGTCACCATCACATGC |
| VL3 | | GWYQQKPGKAPKRLI | | CGGGCTTCCCGGGATATCAACAACTTCCTTGGGT |
| | | YRANSLQSGVPSRFSG | | GGTATCAGCAGAAGCCCGGAAAAGCCCCCAAAC |
| | | SGSGTEFTLTISSLQPE | | GGCTCATCTACAGAGCGAATTCCCTGCAGTCAGG |
| | | DFATYYCLQYGDLYTF | | TGTCCCCAGTAGGTTCAGCGGATCAGGCTCGGGG |
| | | GQGTKVEIK | | ACCGAATTCACTCTGACCATTAGCTCACTGCAGCC |
| | | | | TGAGGATTTCGCTACTTACTATTGCCTGCAATACG |
| | | | | GCGATCTGTACACTTTCGGGCAGGGCACCAAGGT |
| | | | | GGAAATAAAA |
| Anti- | 335 | EIVLTQSPGTLSLSPGE | 336 | GAAATCGTACTGACCCAGTCTCCCGGAACCCTGA |
| MUC16 | | RATLSCRASRDINNFLA | | GTCTCTCACCCGGCGAGCGCGCAACACTGTCGTG |
| VL4 | | WYQQKPGQAPRLLIYR | | TAGGGCCAGTAGGGACATAAATAACTTCCTAGCC |
| | | ANSRATGIPDRFSGSG | | TGGTACCAACAAAAACCGGGTCAGGCTCCAAGAC |
| | | SGTDFTLTISRLEPEDF | | TGTTGATCTATAGAGCTAACTCCAGGGCCACCGG |
| | | AVYYCLQYGDLYTFGQ | | CATCCCAGACCGATTCTCAGGCTCCGGATCTGGA |
| | | GTKVEIK | | ACCGACTTCACGCTCACCATTAGCCGACTAGAACC |
| | | | | TGAGGACTTTGCTGTATACTATTGCCTGCAGTACG |
| | | | | GCGACCTGTATACCTTTGGACAGGGTACCAAGGT |
| | | | | CGAGATCAAG |
| Anti- | 337 | EIVLTQSPATLSLSPGE | 338 | GAGATCGTACTTACGCAGAGCCCAGCAACTCTGT |
| MUC16 | | RATLSCRASRDINNFLA | | CTCTGTCCCCCGGAGAACGGGCCACCCTGTCGTG |
| VL5 | | WYQQKPGQAPRLLIYR | | CCGGGCCAGCCGTGATATTAATAATTTCCTGGCCT |
| | | ANNRATGIPARFSGSG | | GGTATCAACAAAAACCGGGGCAGGCTCCTCGACT |
| | | PGTDFTLTISSLEPEDFA | | GTTGATCTACCGGGCCAACAATAGAGCAACTGGT |
| | | VYYCLQYGDLYTFGGG | | ATCCCTGCTCGCTTCTCCGGCAGTGGGCCAGGTA |
| | | TKVEIK | | CAGACTTCACCCTGACTATTTCGTCACTCGAACCA |
| | | | | GAAGACTTTGCCGTGTATTATTGCTTACAATACGG |
| | | | | GGATCTGTACACTTTCGGAGGAGGAACTAAGGTC |
| | | | | GAAATTAAG |
| Anti- | 339 | EIVLTQSPDFQSVTPKE | 340 | GAGATCGTGCTGACCCAGAGCCCCGACTTCCAGA |
| MUC16 | | KVTITCRASRDINNFLH | | GCGTGACCCCCAAGGAGAAGGTGACCATCACCTG |
| VL6 | | WYQQKPDQSPKLLIKR | | CAGAGCCAGCAGAGACATCAACAACTTCCTGCAC |
| | | ANQSFSGVPSRFSGSG | | TGGTACCAGCAGAAGCCCGACCAGAGCCCCAAG |
| | | SGTDFTLTINSLEAEDA | | CTGCTGATCAAGAGAGCCAACCAGAGCTTCAGCG |
| | | ATYYCLQYGDLYTFGQ | | GCGTGCCCAGCAGATTCAGCGGCAGCGGCAGCG |
| | | GTKVEIK | | GCACCGACTTCACCCTGACCATCAACAGCCTGGA |
| | | | | GGCCGAGGACGCCGCCACCTACTACTGCCTGCAG |
| | | | | TACGGCGACCTGTACACCTTCGGCCAGGGCACCA |
| | | | | AGGTGGAGATCAAG |
| Anti- | 341 | DIQMTQSPSSLSASVG | 342 | GACATCCAGATGACCCAGAGCCCCAGCAGCCTGA |
| MUC16 | | DRVTITCRASRDINNFL | | GCGCCAGCGTGGGCGACAGAGTGACCATCACCT |
| VL7 | | AWFQQKPGKAPKSLIY | | GCAGAGCCAGCAGAGACATCAACAACTTCCTGGC |
| | | RANSLQSGVPSRFSGS | | CTGGTTCCAGCAGAAGCCCGGCAAGGCCCCCAAG |
| | | GSGTDFTLTISSLQPED | | AGCCTGATCTACAGAGCCAACAGCCTGCAGAGCG |
| | | FATYYCLQYGDLYTFG | | GCGTGCCCAGCAGATTCAGCGGCAGCGGCAGCG |
| | | GGTKVEIK | | GCACCGACTTCACCCTGACCATCAGCAGCCTGCA |
| | | | | GCCCGAGGACTTCGCCACCTACTACTGCCTGCAG |
| | | | | TACGGCGACCTGTACACCTTCGGCGGCGGCACCA |
| | | | | AGGTGGAGATCAAG |
| Anti- | 662 | DIQMTQSPSSLSASVG | 663 | GACATCCAGATGACCCAGAGCCCCAGCAGCCTGA |
| MUC16 | | DRVTITCRASRDINNFL | | GCGCCAGCGTGGGCGACAGAGTGACCATCACCT |
| VL8 | | AWYQQKPGKAPKLLL | | GCAGAGCCAGCAGAGACATCAACAACTTCCTGGC |
| | | YRANRLESGVPSRFSG | | CTGGTACCAGCAGAAGCCCGGCAAGGCCCCCAA |
| | | SGSGTDYTLTISSLQPE | | GCTGCTGCTGTACAGAGCCAACAGACTGGAGAG |
| | | DFATYYCLQYGDLYTF | | CGGCGTGCCCAGCAGATTCAGCGGCAGCGGCAG |
| | | GGGTKVEIK | | CGGCACCGACTACACCCTGACCATCAGCAGCCTG |
| | | | | CAGCCCGAGGACTTCGCCACCTACTACTGCCTGC |
| | | | | AGTACGGCGACCTGTACACCTTCGGCGGCGGCAC |
| | | | | CAAGGTGGAGATCAAG |
| Anti- | 664 | DIQMTQSPSSLSASVG | 665 | GACATCCAGATGACCCAGAGCCCCAGCAGCCTGA |
| MUC16 | | DRVTITCKASRDINNFL | | GCGCCAGCGTGGGCGACAGAGTGACCATCACCT |
| VL9 | | SWYQQKPGKAPKLLIY | | GCAAGGCCAGCAGAGACATCAACAACTTCCTGAG |
| | | RANRLVDGVPSRFSGS | | CTGGTACCAGCAGAAGCCCGGCAAGGCCCCCAA |
| | | GSGTDFTFTISSLQPED | | GCTGCTGATCTACAGAGCCAACAGACTGGTGGAC |
| | | IATYYCLQYGDLYTFGG | | GGCGTGCCCAGCAGATTCAGCGGCAGCGGCAGC |
| | | GTKVEIK | | GGCACCGACTTCACCTTCACCATCAGCAGCCTGCA |
| | | | | GCCCGAGGACATCGCCACCTACTACTGCCTGCAG |
| | | | | TACGGCGACCTGTACACCTTCGGCGGCGGCACCA |
| | | | | AGGTGGAGATCAAG |
| Anti- | 666 | DIQMTQSPSSLSASVG | 667 | GACATCCAGATGACCCAGAGCCCCAGCAGCCTGA |
| MUC16 | | DRVTITCKASRDINNFL | | GCGCCAGCGTGGGCGACAGAGTGACCATCACCT |
| VL10 | | SWYQQKPGKAPKLLIY | | GCAAGGCCAGCAGAGACATCAACAACTTCCTGAG |
| | | RANRLVDGVPSRFSGS | | CTGGTACCAGCAGAAGCCCGGCAAGGCCCCCAA |
| | | GSGTDFTLTISSLQPED | | GCTGCTGATCTACAGAGCCAACAGACTGGTGGAC |
| | | FATYYCLQYGDLYTFG | | GGCGTGCCCAGCAGATTCAGCGGCAGCGGCAGC |
| | | QGTKVEIK | | GGCACCGACTTCACCCTGACCATCAGCAGCCTGC |
| | | | | AGCCCGAGGACTTCGCCACCTACTACTGCCTGCA |
| | | | | GTACGGCGACCTGTACACCTTCGGCCAGGGCACC |
| | | | | AAGGTGGAGATCAAG |
| Anti- | 668 | EIVLTQSPGTLSLSPGE | 669 | GAGATCGTGCTGACCCAGAGCCCCGGCACCCTGA |
| MUC16 | | RATLSCKASRDINNFLS | | GCCTGAGCCCCGGCGAGAGAGCCACCCTGAGCT |
| VL11 | | WYQQKPGQAPRLLIYR | | GCAAGGCCAGCAGAGACATCAACAACTTCCTGAG |
| | | ANRLVDGIPDRFSGSG | | CTGGTACCAGCAGAAGCCCGGCCAGGCCCCCAG |
| | | SGTDFTLTISRLEPEDF | | ACTGCTGATCTACAGAGCCAACAGACTGGTGGAC |
| | | AVYYCLQYGDLYTFGQ | | GGCATCCCCGACAGATTCAGCGGCAGCGGCAGC |
| | | GTKVEIK | | GGCACCGACTTCACCCTGACCATCAGCAGACTGG |
| | | | | AGCCCGAGGACTTCGCCGTGTACTACTGCCTGCA |
| | | | | GTACGGCGACCTGTACACCTTCGGCCAGGGCACC |
| | | | | AAGGTGGAGATCAAG |
| Anti- | 670 | EIVLTQSPATLSLSPGE | 671 | GAGATCGTGCTGACCCAGAGCCCCGCCACCCTGA |
| MUC16 | | RATLSCKASRDINNFLS | | GCCTGAGCCCCGGCGAGAGAGCCACCCTGAGCT |
| VL12 | | WYQQKPGQAPRLLIYR | | GCAAGGCCAGCAGAGACATCAACAACTTCCTGAG |
| | | ANRLVDGIPARFSGSG | | CTGGTACCAGCAGAAGCCCGGCCAGGCCCCCAG |
| | | SGTDFTLTISSLEPEDFA | | ACTGCTGATCTACAGAGCCAACAGACTGGTGGAC |
| | | VYYCLQYGDLYTFGQG | | GGCATCCCCGCCAGATTCAGCGGCAGCGGCAGC |
| | | TKVEIK | | GGCACCGACTTCACCCTGACCATCAGCAGCCTGG |
| | | | | AGCCCGAGGACTTCGCCGTGTACTACTGCCTGCA |
| | | | | GTACGGCGACCTGTACACCTTCGGCCAGGGCACC |
| | | | | AAGGTGGAGATCAAG |
| Anti- | 688 | DIELTQSPSSLAVSAGE | 689 | GACATCGAGCTGACACAGAGCCCATCTAGCCTG |
| MUC16 VL | | KVTMSCKSSQSLLNSR | | GCTGTGTCTGCCGGCGAGAAAGTGACCATGAG |
| | | TRKNQLAWYQQKPG | | CTGCAAGAGCAGCCAGAGCCTGCTGAACAGCC |
| | | QSPELLIYWASTRQSG | | GGACCAGAAAGAATCAGCTGGCCTGGTATCAGC |
| | | VPDRFTGSGSGTDFTL | | AGAAGCCCGGCCAATCTCCTGAGCTGCTGATCT |
| | | TISSVQAEDLAVYYCQ | | ACTGGGCCAGCACAAGACAGAGCGGCGTGCC |
| | | QSYNLLTFGPGTKLEV | | CGATAGATTCACAGGATCTGGCAGCGGCACCG |
| | | KR | | ACTTCACCCTGACAATCAGTTCTGTGCAGGCCG |
| | | | | AGGACCTGGCCGTG |
| | | | | TACTACTGTCAGCAGAGCTACAACCTGCTGACCT |
| | | | | TCGGACCCGGCACCAAGCTGGAAGTGAAGAGA |
| Anti- | 690 | DIELTQSPSSLAVSAGE | 691 | GACATCGAGCTGACACAGAGCCCATCTAGCCTG |
| MUC16 VL | | KVTMSCKSSQSLLNSR | | GCTGTGTCTGCCGGCGAGAAAGTGACCATGA |
| | | TRKNQLAWYQQKTG | | GCTGCAAGAGCAGCCAGAGCCTGCTGAACAGC |
| | | QSPELLIYWASTRQSG | | CGGACCAGAAAGAATCAGCTGGCCTGGTATCA |
| | | VPDRFTGSGSGTDFTL | | GCAGAAAACCGGACAGAGCCCCGAGCTGCTG |
| | | TISSVQAEDLAVYYCQ | | ATCTACTGGGCCAGCACAAGACAGAGCGGCGTG |
| | | QSYNLLTFGPGTKLEIKR | | CCCGATAGATTCACAGGATCTGGCAGCGGCACC |
| | | | | GACTTCACCCTGACAATCAGTTCTGTGCAGGCC |
| | | | | GAGGACCTGGCCGTGTACTACTGTCAGCAGAGC |
| | | | | TACAACCTGCTGACCTTCGGACCCGGCACCAAG |
| | | | | CTGGAAATCAAGAGA |
| Anti- | 692 | DIKMAQSPSSVNASL | 693 | GACATCAAGATGGCTCAGTCCCCTTCTAGCGT |
| MUC16 VL | | GERVTITCKASRDINN | | GAATGCTTCGCTAGGGGAGCGTGTGACCATCAC |
| | | FLSWFHQKPGKSTL | | ATGTAAAGCATCACGCGACATAAATAATTTCCTT |
| | | IYRANRLVDGVPSRFS | | TCCTGGTTTCATCAGAAACCGGGCAAGTCGCCTA |
| | | GSGSGQDYSFTISSLEY | | AGACGCTGATTTACAGAGCAAATCGGTTGGTAG |
| | | EDVGIYYCLQYGDLYTF | | ATGGAGTGCCAAGCAGATTCAGCGGGAGCGG |
| | | GGGTKLEIK | | AAGTGGACAGGATTATAGCTTCACTATTTCATC |
| | | | | CCTGGAATACGAGGACGTAGGTATCTATTATTG |
| | | | | CCTCCAGTATGGCGATCTTTACACATTTGGTGGG |
| | | | | GGGACTAAGCTGGAGATTAAG |
| Anti- | 694 | DIQMTQSSSFLSVSLG | 695 | GACATCCAGATGACCCAGAGCAGCAGCTTCCTG |
| MUC16 VL | | GRVTITCKASDLIHN | | AGCGTGTCCCTTGGCGGCAGAGTGACCATCAC |
| | | WLAWYQQKPGNAPR | | CTGTAAAGCCAGCGACCTGATCCACAACTGGCT |
| | | LLISGATSLETGVPSRF | | GGCCTGGTATCAGCAGAAGCCTGGCAACGCTCC |
| | | SGSGSGNDYTLSIASLQ | | CAGACTGCTGATTAGCGGCGCCACCTCTCTGGA |
| | | TEDAATYYCQQYWTT | | AACAGGCGTGCCAAGCAGATTTTCCGGCAGCGG |
| | | PFTFGSGTKLEIK | | CTCCGGCAACGACTACACACTGTCTATTGCCAG |
| | | | | CCTGCAGACCGAGGATGCCGCCACCTATTACTG |
| | | | | CCAGCAGTACTGGACCACACCTTTCACCTTTG |
| | | | | GCAGCGGCACCAAGCTGGAAATCAAG |
| Anti- | 696 | DIQMTQSPSSLSASV | 697 | GACATCCAGATGACCCAGAGCCCCAGCAGCCTGA |
| MUC16 VL | | GDRVTITCKASDLIHN | | GCGCCAGCGTGGGCGACAGGGTGACCATCACCT |
| | | WLAWYQQKPGKAPK | | GCAAGGCCAGCGACCTGATCCACAACTGGCTGGC |
| | | LLISGATSLETGVPSRFS | | CTGGTACCAGCAGAAGCCCGGCAAGGCCCCCAA |
| | | GSGSGTDFTLTISSLQP | | GCTGCTGATCAGCGGCGCCACCAGCCTGGAGACC |
| | | EDFATYYCQQYWTTPF | | GGCGTGCCCAGCAGGTTCAGCGGCAGCGGCAGC |
| | | TFGQGTKVEIKR | | GGCACCGACTTCACCCTGACCATCAGCAGCCTG |
| | | | | CAGCCCGAGGACTTCGCCACCTACTACTGCCAG |
| | | | | CAGTACTGGACCACCCCCTTCACCTTCGGCCAG |
| | | | | GGCACCAAGGTGGAGATCAAGAGG |
| Anti- | 698 | DIVLTQSPAIMSASLG | 699 | GACATCGTGCTGACACAGAGCCCTGCCATCATG |
| MUC16 VL | | ERVTMTCTASSSVSS | | TCTGCCAGCCTCGGCGAGCGAGTGACCATGACA |
| | | SYLHWYQQKPGSSP | | TGTACAGCCAGCAGCAGCGTGTCCAGCAGCTAC |
| | | KLWIYSTSNLASGVPG | | CTGCATTGGTATCAGCAGAAGCCCGGCAGCAGC |
| | | RFSGSGSGTSYSLTIS | | CCCAAGCTGTGGATCTACAGCACAAGCAATCTG |
| | | SMEAEDAATYYCH | | GCCAGCGGCGTGCCAGGCAGATTTTCTGGTTC |
| | | QYHRSPYTFGGGTKV | | TGGCAGCGGCACCAGCTACAGCCTGACAATCAG |
| | | EIKR | | CAGCATGGAAGCCGAGGATGCCGCCACCTAC |
| | | | | TACTGCCACCAGTACCACAGAAGCCCCTACACC |
| | | | | TTTGGCGGAGGCACCAAGGTGGAAATCAAGC |
| | | | | GG |
| Anti- | 700 | DIQMTQSPSSLSASV | 701 | GACATCCAGATGACACAGAGCCCTAGCAGCCTG |
| MUC16 VL | | GDRVTITCTASSSVSSS | | TCTGCCAGCGTGGGAGACAGAGTGACCATCACC |
| | | YLHWYQQKPGKAPKL | | TGTACAGCCAGCAGCAGCGTGTCCAGCAGCTAC |
| | | LIYSTSNLASGVPSRFS | | CTGCATTGGTATCAGCAGAAGCCCGGCAAGGCC |
| | | GSGSGTDFTLTISSLQ | | CCTAAGCTGCTGATCTACAGCACCAGCAATCTGG |
| | | PEDFATYYCHQYHRSP | | CCAGCGGCGTGCCAAGCAGATTTTCTGGCTCT |
| | | YTFGQGTKVEIKR | | GGCAGCGGCACCGACTTCACCCTGACCATATCT |
| | | | | AGCCTGCAGCCTGAGGACTTCGCCACCTACTAC |
| | | | | TGCCACCAGTACCACAGAAGCCCCTACACCTTT |
| | | | | GGCCAGGGCACCAAGGTGGAAATCAAGCGG |
| Anti- | 343 | DIKMAQSPSSVNA | 344 | GACATCAAGATGGCTCAGTCCCCTTCTAGCGTGA |
| MUC16 | | SLGERVTITCKASR | | ATGCTTCGCTAGGGGAGCGTGTGACCATCACATG |
| scFv | | DINNFLSWFHQKP | | TAAAGCATCACGCGACATAAATAATTTCCTTTCCT |
| | | GKSPKTLIYRANRL | | GGTTTCATCAGAAACCGGGCAAGTCGCCTAAGAC |
| | | VDGVPSRFSGSGS | | GCTGATTTACAGAGCAAATCGGTTGGTAGATGGA |
| | | GQDYSFTISSLEYE | | GTGCCAAGCAGATTCAGCGGGAGCGGAAGTGGA |
| | | DVGIYYCLQYGDL | | CAGGATTATAGCTTCACTATTTCATCCCTGGAATA |
| | | YTFGGGTKLEIKG | | CGAGGACGTAGGTATCTATTATTGCCTCCAGTAT |
| | | GGGSGGGGSGGG | | GGCGATCTTTACACATTTGGTGGGGGGACTAAGC |
| | | GSDVQLLESGPGL | | TGGAGATTAAG |
| | | VRPSQSLSLTCSVT | | GGCGGAGGCGGAAGCGGAGGCGGAGGCTCCGG |
| | | GYSIVSHYYWNWI | | CGGAGGCGGAAGCGACGTGCAACTTCTGGAGAG |
| | | RQFPGNKLEWMG | | CGGGCCAGGGCTAGTCAGGCCCTCCCAGTCGCTT |
| | | YISSDGSNEYNPSL | | TCACTGACTTGCAGTGTGACCGGTTACTCTATTGT |
| | | KNRISISLDTSKNQ | | GAGTCACTACTATTGGAACTGGATTCGGCAGTTC |
| | | FFLKFDFVTTADT | | CCAGGCAACAAACTGGAATGGATGGGGTACATA |
| | | ATYFCVRGVDYW | | TCTTCCGATGGCTCGAATGAATATAACCCATCATT |
| | | GQGTTLTVSS | | GAAAAATCGTATTTCCATCAGTCTGGATACGAGT |
| | | | | AAAAACCAGTTTTTCCTCAAATTCGATTTCGTGAC |
| | | | | TACAGCAGATACTGCCACATACTTCTGTGTACGA |
| | | | | GGTGTCGATTATTGGGGACAGGGCACAACGCTG |
| | | | | ACCGTAAGTTCT |

[0820] Exemplary anti-ROR1 Variable Heavy (VH) and Variable Light (VL) Sequences

| | | Amino acid sequence | | Nucleotide sequence |
|---|---|---|---|---|
| hROR1 VH_04 | 345 | EVQLVESGGGLVQPGGSLRLSCAA | 346 | GAGGTGCAGCTCGTGGAAT |
| | | SGFTFSSYAMSWVRQAPGKGLEW | | CCGGCGGTGGCCTGGTGCA |
| | | VSAISRGGTTYYADSVKGRFTISRD | | GCCGGGCGGCAGTCTTCGA |
| | | NSKNTLYLQMNSLRAEDTAVYYCG | | CTCTCCTGTGCGGCGTCAG |
| | | RYDYDGYYAMDYWGQGTLVTVSS | | GCTTTACGTTCAGTTCTTAT |
| | | | | GCCATGAGCTGGGTGAGGC |
| | | | | AAGCTCCCGGTAAGGGACT |
| | | | | GGAGTGGGTCTCTGCTATC |
| | | | | AGCCGGGGAGGTACGACCT |
| | | | | ACTACGCTGACTCCGTAAAA |
| | | | | GGAAGATTTACCATAAGTC |
| | | | | GTGACAATTCCAAAAACACT |
| | | | | CTATACTTACAGATGAACTC |
| | | | | GCTCAGGGCCGAAGATACC |
| | | | | GCAGTCTACTATTGTGGGA |
| | | | | GATACGATTACGACGGCTA |
| | | | | CTATGCTATGGATTATTGGG |
| | | | | GTCAGGGTACGCTCGTGAC |
| | | | | GGTGTCCTCC |
| hROR1 VL_04 | 347 | DIQMTQSPSSLSASVGDRVTITCQA | 348 | GATATTCAAATGACGCAAA |
| | | SPDINSYLNWYQQKPGKAPKLLIYR | | GTCCCAGCAGCCTCTCCGCC |
| | | ANNLETGVPSRFSGSGSGTDFTLTI | | TCCGTTGGAGACAGGGTGA |
| | | SSLQPEDIATYYCLQYDEFPYTFGQ | | CTATTACATGCCAAGCCAGC |
| | | GTKLEIK | | CCCGATATTAATAGCTACTT |
| | | | | AAATTGGTATCAGCAGAAA |
| | | | | CCTGGGAAGGCACCTAAAC |
| | | | | TTCTCATCTACCGCGCTAAC |
| | | | | AATCTGGAGACCGGCGTGC |
| | | | | CGTCTAGATTTTCCGGCTCT |
| | | | | GGATCAGGGACCGATTTTA |
| | | | | CTCTGACAATTAGTTCCCTG |
| | | | | CAACCCGAAGACATCGCCA |
| | | | | CTTATTATTGCCTGCAATAT |
| | | | | GATGAGTTTCCTTACACATT |
| | | | | TGGTCAGGGAACTAAACTA |
| | | | | GAGATTAAG |
| hROR1 VH_05 | 349 | EVQLVESGGGLVQPGGSLRLSCAA | 350 | GAAGTGCAACTGGTCGAGT |
| | | SGFTFSSYAMSWVRQAPGKGLEW | | CTGGGGGCGGCCTTGTGCA |
| | | VSSISRGGTTYYPDSVKGRFTISRDN | | ACCTGGAGGCAGCCTTCGA |
| | | SKNTLYLQMNSLRAEDTAVYYCGR | | CTCAGTTGCGCCGCGTCTG |
| | | YDYDGYYAMDYWGQGTLVTVSS | | GTTTTACCTTCTCCTCTTACG |
| | | | | CGATGAGCTGGGTTCGCCA |
| | | | | GGCCCCCGGCAAGGGACTT |
| | | | | GAGTGGGTTAGTTCGATCT |
| | | | | CCCGCGGAGGCACCACATA |
| | | | | TTATCCTGACTCGGTTAAGG |
| | | | | GACGCTTCACTATCTCTAGG |
| | | | | GACAATTCAAAGAACACAC |
| | | | | TGTATCTCCAAATGAACTCC |
| | | | | TTGCGGGCCGAGGACACTG |
| | | | | CTGTGTATTATTGCGGACG |
| | | | | ATACGACTACGATGGGTAT |
| | | | | TACGCCATGGATTACTGGG |
| | | | | GGCAAGGTACACTGGTCAC |
| | | | | TGTGAGTTCG |
| hROR1 VL_05 | 351 | DIQMTQSPSSLSASVGDRVTITCKA | 352 | GATATTCAGATGACCCAGTC |
| | | SPDINSYLSWYQQKPGKAPKLLIYR | | ACCTTCGAGTCTGAGCGCA |
| | | ANRLVDGVPSRFSGSGSGTDFTLTI | | TCCGTGGGCGACAGAGTGA |
| | | SSLQPEDIATYYCLQYDEFPYTFGQ | | CCATTACCTGTAAGGCCAGC |
| | | GTKLEIK | | CCGGACATTAACAGCTACCT |
| | | | | ATCGTGGTATCAGCAAAAG |
| | | | | CCTGGTAAGGCCCCTAAACT |
| | | | | CCTTATCTACAGGGCTAATA |
| | | | | GGTTGGTAGACGGGGTGCC |
| | | | | TAGCCGGTTCTCTGGTTCCG |
| | | | | GCAGCGGTACGGACTTTAC |
| | | | | TCTGACCATAAGCTCTCTGC |
| | | | | AACCAGAAGACATCGCAAC |
| | | | | ATACTACTGTTTACAATACG |
| | | | | ACGAATTTCCTTATACCTTT |
| | | | | GGCCAGGGGACCAAGTTAG |
| | | | | AGATCAAG |
| hROR1 VH_06 | 353 | EVQLVESGGGLVQPGGSLRLSCAA | 354 | GAGGTTCAGCTGGTCGAGT |
| | | SGFTFSSYAIIWVRQAPGKGLEWV | | CCGGGGGAGGCTTAGTGCA |
| | | ARISRGGTTRYADSVKGRFTISADT | | GCCAGGAGGCAGTCTGCGG |
| | | SKETAYLQMNSLRAEDTAVYYCGR | | CTCTCTTGCGCTGCAAGTGG |
| | | YDYDGYYAMDYWGQGTLVTVSS | | CTTCACATTCAGTTCATACG |
| | | | | CAATCATCTGGGTTCGACA |
| | | | | GGCTCCTGGTAAGGGCCTC |
| | | | | GAATGGGTCGCAAGGATAT |
| | | | | CACGAGGTGGAACCACTAG |
| | | | | ATACGCAGACTCTGTTAAG |
| | | | | GGCAGGTTCACAATTAGCG |
| | | | | CGGATACCTCCAAGGAGAC |
| | | | | TGCTTATTTACAGATGAACT |
| | | | | CTCTGAGAGCCGAGGACAC |
| | | | | TGCTGTTTACTACTGCGGCC |
| | | | | GATACGATTACGACGGATA |
| | | | | TTACGCAATGGATTACTGG |
| | | | | GGCCAGGGCACGCTGGTGA |
| | | | | CAGTTTCATCG |
| hROR1 VL_06 | 355 | DIQMTQSPSSLSASVGDRVTITCKA | 356 | GATATCCAGATGACTCAGA |
| | | SPDINSYLSWYQQKPGKAPKLLIYR | | GTCCCAGTAGCCTGTCGGC |
| | | ANRLVDGVPSRFSGSGSGTDFTLTI | | AAGCGTCGGAGATCGGGTC |
| | | SSLQPEDIATYYCLQYDEFPYTFGQ | | ACAATTACCTGCAAAGCTA |
| | | GTKLEIK | | GTCCTGATATTAATTCTTAC |
| | | | | TTGTCCTGGTATCAGCAGA |
| | | | | AGCCTGGTAAGGCCCCTAA |
| | | | | GTTGCTCATCTATCGGGCTA |
| | | | | ACCGGCTGGTGGACGGTGT |
| | | | | TCCCTCTAGATTCTCAGGGA |
| | | | | GTGGAAGCGGCACTGACTT |
| | | | | CACCCTGACTATATCGAGCC |
| | | | | TTCAGCCAGAGGACATTGC |
| | | | | CACATACTACTGTCTGCAAT |
| | | | | ATGATGAATTTCCATATACA |
| | | | | TTCGGACAAGGTACAAAGT |
| | | | | TAGAAATTAAG |
| hROR1 VH_07 | 357 | EVQLVESGGGLVQPGGSLRLSCAA | 358 | GAAGTCCAACTGGTGGAGT |
| | | SGFTFSSYAIIWVRQAPGKGLEWV | | CTGGCGGGGGCTTGGTGCA |
| | | ARISRGGTTRYADSVKGRFTISADT | | GCCCGGTGGCTCCCTTAGG |
| | | SKETAYLQMNSLRAEDTAVYYCGR | | CTGTCTTGCGCTGCCAGCG |
| | | YDYDGYYAMDYWGQGTLVTVSS | | GGTTCACATTCAGCTCCTAT |
| | | | | GCGATTATATGGGTCCGAC |
| | | | | AGGCACCCGGCAAGGGATT |
| | | | | GGAGTGGGTGGCTCGCATC |
| | | | | AGCAGAGGCGGCACTACTC |
| | | | | GTTACGCCGACTCCGTGAA |
| | | | | AGGCAGATTCACCATCAGT |
| | | | | GCAGACACATCCAAGGAAA |
| | | | | CCGCATATCTTCAGATGAAT |
| | | | | AGCCTGCGAGCGGAGGATA |
| | | | | CCGCCGTCTATTATTGCGGA |
| | | | | CGCTATGATTACGACGGTT |
| | | | | ATTATGCTATGGACTACTGG |
| | | | | GGCCAGGGCACACTTGTGA |
| | | | | CCGTCAGTAGC |
| hROR1 VL_07 | 359 | DIQMTQSPSSLSASVGDRVTITCRA | 360 | GACATTCAAATGACGCAAA |
| | | SPDINSYVAWYQQKPGKAPKLLIYR | | GCCCTAGTAGCTTGTCAGCT |
| | | ANFLESGVPSRFSGSRSGTDFTLTIS | | TCTGTGGGGGACCGTGTCA |
| | | SLQPEDFATYYCLQYDEFPYTFGQG | | CAATCACTTGTCGGGCCTCT |
| | | TKVEIK | | CCAGATATAAACTCCTACGT |
| | | | | TGCTTGGTATCAGCAGAAG |
| | | | | CCCGGAAAGGCTCCGAAAT |
| | | | | TGTTGATTTATCGCGCTAAT |
| | | | | TTCTTAGAGTCAGGAGTGC |
| | | | | CCAGCCGGTTCTCAGGGTC |
| | | | | TCGCTCTGGAACCGACTTCA |
| | | | | CACTCACTATTTCTAGCCTA |
| | | | | CAGCCTGAGGATTTTGCAA |
| | | | | CTTACTACTGTCTACAGTAC |
| | | | | GACGAGTTTCCGTACACTTT |
| | | | | CGGACAGGGGACCAAGGT |
| | | | | GGAGATCAAG |
| hROR1 VH_08 | 361 | QVQLVQSGGGLVKPGGSLRLSCAA | 362 | CAAGTACAGCTCGTGCAGA |
| | | SGFTFSSYAMSWVRQIPGKGLEW | | GCGGCGGTGGCCTGGTGAA |
| | | VSSISRGGTTYYPDSVKGRFTISRDN | | GCCAGGAGGTAGTCTTAGA |
| | | VKNTLYLQMSSLRAEDTAVYYCGR | | CTGAGCTGTGCGGCTTCTG |
| | | YDYDGYYAMDYWGQGTMVTVSS | | GTTTCACGTTCAGCAGTTAT |
| | | | | GCTATGTCCTGGGTTAGGC |
| | | | | AAATCCCCGGCAAAGGATT |
| | | | | GGAGTGGGTTAGCAGTATC |
| | | | | TCAAGGGGGGGAACCACAT |
| | | | | ATTATCCTGACTCTGTCAAA |
| | | | | GGACGGTTTACAATCAGCC |
| | | | | GCGATAACGTTAAAAATAC |
| | | | | CCTCTACCTCCAGATGTCTT |
| | | | | CGCTCCGCGCTGAAGATAC |
| | | | | AGCGGTTTACTACTGTGGC |
| | | | | AGATACGACTACGACGGTT |
| | | | | ATTACGCCATGGACTACTG |
| | | | | GGGACAGGGAACTATGGTC |
| | | | | ACAGTTAGCTCT |
| hROR1 VL_08 | 363 | DIKMTQSPSSLSASVGDRVTITCKA | 364 | GACATCAAAATGACGCAGT |
| | | SPDINSYLSWYQQKPGKAPKTLIYR | | CACCTAGTAGCCTCTCCGCC |
| | | ANRLVDGVPSRFSGSGSGTDFTLTI | | TCGGTTGGCGATCGGGTAA |
| | | SSLQYEDMAIYYCLQYDEFPYTFGD | | CCATTACCTGCAAAGCATCT |
| | | GTKVEIK | | CCAGACATAAATAGTTATCT |
| | | | | TAGTTGGTATCAACAGAAA |
| | | | | CCTGGCAAAGCTCCTAAGA |
| | | | | CCCTCATCTACCGCGCTAAC |
| | | | | CGCCTCGTGGATGGTGTTC |
| | | | | CAAGTCGGTTCTCAGGAAG |
| | | | | CGGCAGTGGCACAGACTTT |
| | | | | ACACTGACAATTAGTTCCCT |
| | | | | CCAGTATGAGGATATGGCC |
| | | | | ATATATTACTGCCTTCAGTA |
| | | | | TGATGAGTTTCCATACACAT |
| | | | | TCGGAGACGGTACAAAGGT |
| | | | | GGAGATCAAG |
| hROR1 VH_09 | 365 | QVSLRESGGGLVQPGRSLRLSCTAS | 366 | CAAGTGAGCCTCCGGGAGA |
| | | GFTFSSYAMTWVRQAPGKGLEWV | | GTGGGGGCGGTCTGGTCCA |
| | | ASISRGGTTHFADSVKGRFTISRDN | | ACCAGGACGGTCACTGCGG |
| | | SNNTLYLQMDNVRDEDTAIYYCGR | | CTGTCATGCACTGCCAGCG |
| | | YDYDGYYAMDYWGRGTLVTVSS | | GCTTCACATTTAGCTCTTAC |
| | | | | GCCATGACTTGGGTCCGCC |
| | | | | AAGCTCCCGGTAAGGGACT |
| | | | | GGAGTGGGTGGCCAGCATT |
| | | | | AGCAGGGGTGGTACAACCC |
| | | | | ACTTCGCGGATTCAGTTAA |
| | | | | GGGGAGATTCACTATCTCC |
| | | | | AGGGATAATTCCAACAACA |
| | | | | CGCTGTACCTTCAGATGGAT |
| | | | | AACGTGAGAGACGAGGATA |
| | | | | CCGCGATATACTACTGTGG |
| | | | | CCGCTATGACTACGATGGTT |
| | | | | ATTATGCTATGGATTACTGG |
| | | | | GGGCGGGGCACCCTGGTG |
| | | | | ACTGTGTCCTCG |
| hROR1 VL_09 | 367 | DIVMTQSPSSLSASVGDRVTITCRA | 368 | GATATCGTGATGACACAGT |
| | | SPDINSYLAWYQQKPGKAPKLLIYR | | CACCTAGCTCCCTGAGCGCA |
| | | ANSLQSGVPSRFSGSGSGTEFTLTIS | | AGCGTGGGGGATAGGGTT |
| | | SLQPEDFATYYCLQYDEFPYTFGQG | | ACCATAACTTGCAGGGCCA |
| | | TKLEMK | | GTCCCGACATCAATAGTTAT |
| | | | | TTGGCCTGGTATCAACAGA |
| | | | | AGCCTGGGAAGGCACCTAA |
| | | | | GTTGCTTATTTATAGGGCTA |
| | | | | ACTCGTTACAGAGCGGTGT |
| | | | | GCCAAGTCGGTTCTCAGGC |
| | | | | TCAGGGTCCGGGACCGAGT |
| | | | | TCACCCTGACCATCAGTAGC |
| | | | | TTGCAGCCAGAAGATTTTG |
| | | | | CCACCTACTACTGTCTTCAA |
| | | | | TACGATGAGTTTCCTTACAC |
| | | | | TTTTGGACAGGGCACCAAA |
| | | | | CTAGAGATGAAG |
| hROR1 VH_10 | 369 | QVQLVESGGGVVQPGRSLRLSCAA | 370 | CAGGTTCAACTGGTAGAAT |
| | | SGFTFSSYAMNWVRQAPAKGLEW | | CCGGCGGAGGTGTAGTGCA |
| | | VAIISRGGTQYYADSVKGRFTISRD | | GCCTGGAAGGTCATTACGG |
| | | NSKNTLYLQMNGLRAEDTAVYYCG | | TTAAGTTGCGCCGCCTCCG |
| | | RYDYDGYYAMDYWGQGTLVTVSS | | GGTTCACATTTAGCAGCTAT |
| | | | | GCTATGAACTGGGTGCGCC |
| | | | | AGGCCCCTGCGAAAGGACT |
| | | | | CGAATGGGTTGCCATCATC |
| | | | | AGCCGAGGAGGCACACAGT |
| | | | | ATTATGCCGATTCTGTGAAG |
| | | | | GGTCGTTTTACTATTTCCAG |
| | | | | AGACAACAGTAAAAATACG |
| | | | | CTGTACCTGCAAATGAACG |
| | | | | GATTGAGGGCTGAGGATAC |
| | | | | CGCCGTGTACTACTGTGGA |
| | | | | CGCTACGACTATGATGGGT |
| | | | | ACTACGCGATGGACTATTG |
| | | | | GGGGCAAGGAACCCTTGTA |
| | | | | ACCGTTAGTTCA |
| hROR1 VL_10 | 371 | EIVLTQSPDFQSVTPKEKVTITCRAS | 372 | GAGATCGTTTTGACACAGA |
| | | PDINSYLSWYQQKPDQSPKLLIKRA | | GCCCCGATTTCCAGAGCGT |
| | | NQSFSGVPSRFSGSGSGTDFTLTIN | | CACGCCCAAGGAGAAGGTC |
| | | SLEAEDAAAYYCLQYDEFPYTFGPG | | ACCATCACCTGCCGAGCCA |
| | | TKVDIK | | GCCCCGACATCAACAGTTAT |
| | | | | CTTTCATGGTATCAACAGAA |
| | | | | ACCTGATCAGAGCCCTAAG |
| | | | | CTGCTGATTAAGCGCGCCA |
| | | | | ACCAGAGCTTCTCAGGGGT |
| | | | | TCCTTCACGGTTTTCCGGGT |
| | | | | CAGGCAGCGGGACTGACTT |
| | | | | CACGTTGACCATTAACTCTT |
| | | | | TGGAGGCTGAGGATGCTGC |
| | | | | TGCCTATTACTGCCTTCAGT |
| | | | | ACGACGAGTTCCCCTATACA |
| | | | | TTTGGTCCTGGAACAAAAG |
| | | | | TGGATATAAAG |
| hROR1 VH_11 | 373 | QVQLVQSGAEVKKPGASVKVSCKA | 374 | CAGGTGCAGCTCGTCCAGA |
| | | SGFTFSSYAMHWVRQAPGQGLE | | GCGGAGCCGAAGTGAAGA |
| | | WMGNISRGGTTNYAEKFKNRVTM | | AGCCGGGAGCATCAGTGAA |
| | | TRDTSISTAYMELSRLRSDDTAVYY | | AGTTTCCTGCAAAGCAAGT |
| | | CGRYDYDGYYAMDYWGQGTLVT | | GGCTTCACTTTCAGCAGTTA |
| | | VSS | | CGCGATGCACTGGGTGCGG |
| | | | | CAGGCACCAGGTCAGGGAC |
| | | | | TGGAATGGATGGGGAACAT |
| | | | | CTCTCGCGGCGGAACAACC |
| | | | | AATTACGCAGAGAAGTTTA |
| | | | | AGAATCGCGTTACGATGAC |
| | | | | CAGAGACACTTCTATTAGTA |
| | | | | CAGCCTATATGGAGTTGTC |
| | | | | GCGTCTGAGAAGCGACGAT |
| | | | | ACCGCTGTCTACTATTGCGG |
| | | | | CCGGTACGATTATGACGGC |
| | | | | TACTATGCAATGGATTACTG |
| | | | | GGGACAGGGCACACTTGTG |
| | | | | ACAGTGTCTAGT |
| hROR1 VL_11 | 375 | DIVMTQSPLSLPVTPGEPASISCRSS | 376 | GACATTGTGATGACTCAGT |
| | | PDINSYLEWYLQKPGQSPQLLIYRA | | CTCCACTCAGCCTGCCTGTC |
| | | NDRFSGVPDRFSGSGSGTDFTLKIS | | ACGCCCGGCGAACCCGCTT |
| | | RVEAEDVGVYYCLQYDEFPYTFGQ | | CTATCTCTTGTAGGAGTAGC |
| | | GTKVEIK | | CCTGATATCAACAGCTACCT |
| | | | | CGAATGGTATCTCCAGAAA |
| | | | | CCTGGTCAGAGCCCCCAGC |
| | | | | TCTTGATCTATAGAGCAAAC |
| | | | | GACAGGTTCTCTGGCGTGC |
| | | | | CTGATAGGTTTTCCGGTAGT |
| | | | | GGCAGCGGAACCGACTTCA |
| | | | | CACTTAAGATTTCAAGGGTC |
| | | | | GAGGCCGAGGACGTGGGG |
| | | | | GTGTATTACTGCTTACAGTA |
| | | | | CGATGAGTTTCCGTATACAT |
| | | | | TCGGGCAAGGCACAAAGGT |
| | | | | GGAAATTAAG |
| hROR1 VH_12 | 377 | EVQLVESGGGLVQPGGSLRLSCTG | 378 | GAAGTGCAACTGGTCGAAA |
| | | SGFTFSSYAMHWLRQVPGEGLEW | | GTGGAGGGGGACTAGTGC |
| | | VSGISRGGTIDYADSVKGRFTISRD | | AGCCCGGAGGGTCACTGAG |
| | | DAKKTLSLQMNSLRAEDTAVYYCG | | GCTATCATGCACCGGCTCTG |
| | | RYDYDGYYAMDYWGQGTMVTVSS | | GTTTTACTTTTTCCAGCTAT |
| | | | | GCCATGCACTGGCTCAGAC |
| | | | | AGGTTCCGGGGGAAGGACT |
| | | | | GGAGTGGGTTAGCGGAATC |
| | | | | TCCAGAGGCGGAACTATTG |
| | | | | ACTACGCAGACAGCGTGAA |
| | | | | AGGTAGGTTTACCATCAGC |
| | | | | AGGGACGATGCTAAAAAGA |
| | | | | CCCTGTCACTTCAAATGAAT |
| | | | | AGCCTGAGAGCTGAGGATA |
| | | | | CGGCCGTGTATTACTGTGG |
| | | | | ACGCTATGACTACGATGGA |
| | | | | TATTACGCAATGGACTACTG |
| | | | | GGGCCAGGGAACAATGGT |
| | | | | GACCGTCTCAAGC |
| hROR1 VL_12 | 379 | EIVLTQSPATLSVSPGERATLSCRAS | 380 | GAGATCGTCCTGACCCAGA |
| | | PDINSYLAWYQQKPGQAPRLLFSR | | GCCCAGCTACTTTGTCAGTT |
| | | ANNRATGIPARFTGSGSGTDFTLTI | | TCGCCAGGCGAGCGGGCCA |
| | | SSLEPEDFAIYYCLQYDEFPYTFGQG | | CACTGAGCTGTAGGGCTTC |
| | | TKVEIK | | TCCTGATATCAATTCTTACC |
| | | | | TGGCCTGGTATCAACAGAA |
| | | | | ACCGGGACAGGCCCCTCGC |
| | | | | CTGCTGTTCTCCCGCGCCAA |
| | | | | CAATAGGGCGACTGGCATA |
| | | | | CCAGCTCGGTTTACTGGGA |
| | | | | GTGGGTCAGGCACTGATTT |
| | | | | CACGCTTACAATCAGTAGCC |
| | | | | TGGAGCCCGAAGACTTCGC |
| | | | | CATCTACTACTGTTTACAAT |
| | | | | ACGATGAGTTCCCCTATACC |
| | | | | TTCGGCCAAGGGACCAAGG |
| | | | | TGGAGATCAAG |
| hROR1 VH_13 | 381 | EVQLVESGGGVVQPGRSLRLSCAA | 382 | GAAGTGCAGCTAGTAGAAA |
| | | SGFTFSSYAMSWVRQAPGKGLEW | | GTGGTGGTGGGGTCGTGCA |
| | | VASISRGGTQYYADSVKGRFTISRD | | GCCAGGCCGCTCGCTCAGG |
| | | NSKNTLYLQMNGLRAEDTAVYYCG | | CTGTCTTGCGCTGCGAGTG |
| | | RYDYDGYYAMDYWGQGTLVTVSS | | GTTTCACATTCTCTTCATAC |
| | | | | GCCATGAGCTGGGTGAGAC |
| | | | | AGGCTCCCGGCAAGGGCCT |
| | | | | CGAATGGGTCGCATCTATA |
| | | | | AGCAGAGGCGGAACCCAGT |
| | | | | ACTACGCTGACAGTGTGAA |
| | | | | GGGTCGCTTTACAATCTCAC |
| | | | | GGGACAACAGTAAAAACAC |
| | | | | CCTCTATCTACAGATGAATG |
| | | | | GCTTGCGAGCTGAAGACAC |
| | | | | GGCTGTGTATTATTGCGGG |
| | | | | CGCTATGACTATGATGGTTA |
| | | | | CTACGCTATGGATTACTGG |
| | | | | GGCCAGGGCACCCTGGTTA |
| | | | | CTGTTTCATCA |
| hROR1 VL_13 | 383 | EIVLTQSPDFQSVTPKEKVTITCRAS | 384 | GAAATAGTCCTGACCCAGA |
| | | PDINSYLPWYQQKPDQSPKLLIKRA | | GCCCAGACTTCCAGTCCGT |
| | | NQSFSGVPSRFSGSGSGTDFTLTIN | | GACCCCTAAGGAGAAGGTT |
| | | SLEAEDAAAYYCLQYDEFPYTFGPG | | ACTATCACTTGCAGGGCAA |
| | | TKVDIK | | GCCCTGACATAAATTCATAC |
| | | | | CTGCCATGGTATCAGCAGA |
| | | | | AGCCAGACCAGTCGCCGAA |
| | | | | GCTATTAATCAAACGCGCCA |
| | | | | ACCAGTCTTTTAGCGGCGTA |
| | | | | CCATCCCGATTCTCAGGTTC |
| | | | | GGGGTCCGGGACCGATTTC |
| | | | | ACACTCACGATAAACTCCCT |
| | | | | TGAGGCAGAGGATGCAGC |
| | | | | GGCTTACTACTGTTTACAGT |
| | | | | ACGACGAGTTTCCATATACG |
| | | | | TTCGGCCCCGGCACGAAGG |
| | | | | TAGATATCAAG |
| hROR1 VH_14 | 385 | EVQLVESGGGLVQPGGSLRLSCAT | 386 | GAAGTGCAGCTGGTGGAGT |
| | | SGFTFSSYAMSWMRQAPGKGLE | | CTGGCGGCGGTCTGGTGCA |
| | | WVASISRGGTTYYADSVKGRFTISV | | GCCCGGCGGCTCTCTGCGC |
| | | DKSKNTLYLQMNSLRAEDTAVYYC | | CTCTCCTGTGCCACCTCTGG |
| | | GRYDYDGYYAMDYWGQGTLVTVSS | | TTTTACATTCTCCTCCTACGC |
| | | | | TATGTCCTGGATGCGGCAA |
| | | | | GCCCCCGGCAAGGGCCTAG |
| | | | | AGTGGGTCGCCTCAATCAG |
| | | | | CAGGGGCGGGACGACTTAT |
| | | | | TATGCCGATTCAGTTAAGG |
| | | | | GGAGATTCACAATTTCCGT |
| | | | | GGATAAATCCAAGAATACC |
| | | | | TTATACCTCCAGATGAACTC |
| | | | | TCTGCGGGCCGAAGATACG |
| | | | | GCCGTATATTATTGTGGGA |
| | | | | GGTATGACTACGACGGATA |
| | | | | TTACGCCATGGATTATTGG |
| | | | | GGGCAGGGGACACTTGTTA |
| | | | | CAGTGAGTTCC |
| hROR1 VL_14 | 387 | DIQMTQSPSSLSASVGDRVTITCKA | 388 | GATATACAGATGACACAGA |
| | | SPDINSYLNWYQQKPGKAPKLLIYR | | GCCCTTCAAGTTTATCTGCA |
| | | ANRLVDGVPSRFSGSGSGTDYTLTI | | AGCGTCGGCGATCGTGTTA |
| | | SSLQPEDFATYYCLQYDEFPYTFGA | | CAATAACTTGCAAGGCATCT |
| | | GTKVEIK | | CCCGACATCAATTCCTACCT |
| | | | | CAACTGGTATCAGCAGAAG |
| | | | | CCTGGGAAGGCTCCTAAGC |
| | | | | TGCTTATTTACAGAGCAAAT |
| | | | | CGCCTGGTGGACGGCGTGC |
| | | | | CCAGTCGGTTTTCCGGGTCT |
| | | | | GGGAGCGGAACGGATTACA |
| | | | | CACTGACCATCTCAAGCCTG |
| | | | | CAACCCGAAGACTTCGCTAC |
| | | | | ATATTACTGCCTTCAGTATG |
| | | | | ATGAGTTCCCATATACCTTC |
| | | | | GGCGCTGGGACCAAGGTG |
| | | | | GAGATAAAG |
| hROR1 | 389 | EVQLVESGGGLVQPGGSLRLSCASS | 390 | GAGGTCCAGCTCGTCGAAT |
| VH_14-1 | | GFTFSSYAMSWRRQAPGKGLEWV | | CTGGCGGAGGTTTAGTGCA |
| | | AGISRGGTTSYADSVKGRFTISSDD | | ACCAGGCGGGTCGCTCCGA |
| | | SKNTLYLQMNSLRAEDTAVYYCGR | | TTAAGTTGTGCGTCCAGTG |
| | | YDYDGYYAMDYWGQGTLVTVSS | | GCTTCACCTTCTCCAGCTAC |
| | | | | GCCATGTCGTGGAGGCGAC |
| | | | | AGGCTCCTGGCAAAGGCTT |
| | | | | GGAGTGGGTTGCTGGTATC |
| | | | | TCCCGAGGAGGCACCACTA |
| | | | | GTTACGCTGACAGTGTAAA |
| | | | | AGGACGTTTCACTATTTCCT |
| | | | | CTGACGACAGCAAGAACAC |
| | | | | ACTCTATCTGCAAATGAATA |
| | | | | GTCTCCGTGCTGAGGACAC |
| | | | | AGCCGTGTATTATTGCGGG |
| | | | | CGGTATGATTACGACGGCT |
| | | | | ACTACGCTATGGACTACTG |
| | | | | GGGCCAGGGAACTCTGGTC |
| | | | | ACTGTGAGCTCT |
| hROR1 | 391 | DIQMTQSPSSLSASVGDRVTITCRA | 392 | GATATACAGATGACTCAAA |
| VL 14-1 | | SPDINSYLSWYQQKPGKAPKLLIYR | | GTCCTAGCTCCTTGAGCGCC |
| | | ANTLESGVPSRFSGSGSGTDFTLTIS | | TCAGTGGGAGATCGGGTCA |
| | | SLQPEDFATYYCLQYDEFPYTFGQG | | CTATAACTTGTAGAGCCTCA |
| | | TKIEIK | | CCAGATATAAACTCCTATCT |
| | | | | CTCTTGGTATCAGCAGAAG |
| | | | | CCCGGCAAAGCACCAAAGC |
| | | | | TCTTGATCTATAGAGCTAAT |
| | | | | ACGCTAGAGAGCGGAGTGC |
| | | | | CTTCACGGTTTTCTGGTTCC |
| | | | | GGGAGCGGAACCGACTTTA |
| | | | | CCCTTACAATTTCTAGCCTC |
| | | | | CAGCCAGAGGACTTCGCAA |
| | | | | CTTACTATTGTCTCCAGTAT |
| | | | | GATGAATTTCCTTACACCTT |
| | | | | CGGCCAAGGGACCAAGATC |
| | | | | GAGATAAAG |
| hROR1 | 393 | EVQLVESGGGLVQPGGSLRLSCASS | 394 | GAGGTGCAGCTCGTTGAGT |
| VH_14-2 | | GFTFSSYAMSWVRQAPGKGLEWV | | CCGGTGGGGGGCTGGTGC |
| | | AGISRGGTTSYADSVKGRFTISADT | | AGCCTGGCGGGTCTCTCCG |
| | | SKNTLYLQMNSLRAEDTAVYYCGR | | CCTCTCTTGTGCCTCCTCCG |
| | | YDYDGYYAMDYWGQGTLVTVSS | | GCTTTACCTTCAGCAGCTAT |
| | | | | GCTATGTCATGGGTGCGGC |
| | | | | AGGCACCAGGCAAAGGTCT |
| | | | | GGAATGGGTCGCTGGGATC |
| | | | | AGTAGAGGCGGCACAACCT |
| | | | | CCTATGCCGACAGCGTTAA |
| | | | | GGGGAGGTTCACAATCTCG |
| | | | | GCTGATACAAGCAAGAACA |
| | | | | CTCTGTATCTCCAAATGAAC |
| | | | | AGTCTCCGGGCAGAGGACA |
| | | | | CCGCGGTCTATTACTGCGG |
| | | | | CCGGTACGACTACGACGGG |
| | | | | TACTACGCAATGGACTATTG |
| | | | | GGGACAGGGAACTCTGGTT |
| | | | | ACTGTCAGCTCT |
| hROR1 | 395 | DIQMTQSPSSLSASVGDRVTITCRA | 396 | GATATCCAGATGACTCAAA |
| VL_14-2 | | SPDINSYLSWYQQKPGKAPKLLIYR | | GCCCATCTTCTCTCAGCGCA |
| | | ANTLESGVPSRFSGSGSGTDFTLTIS | | AGCGTGGGTGACCGAGTGA |
| | | SLQPEDFATYYCLQYDEFPYTFGTG | | CCATCACCTGCCGGGCGTCT |
| | | TKLEIK | | CCTGATATCAACTCATACCT |
| | | | | GTCCTGGTATCAGCAGAAG |
| | | | | CCCGGAAAGGCCCCTAAGC |
| | | | | TGCTGATCTACCGCGCAAAT |
| | | | | ACACTGGAGAGCGGGGTCC |
| | | | | CAAGCAGATTCAGTGGGTC |
| | | | | CGGCAGTGGTACGGACTTT |
| | | | | ACTCTGACCATCAGCTCCCT |
| | | | | GCAACCGGAGGACTTTGCT |
| | | | | ACTTATTACTGTCTCCAGTA |
| | | | | CGACGAGTTCCCATACACTT |
| | | | | TCGGAACAGGCACTAAGCT |
| | | | | GGAGATCAAA |
| hROR1 | 397 | EVQLVESGGGLVQPGGSLRLSCAA | 398 | GAGGTTCAACTTGTGGAAT |
| VH_14-3 | | SGFTFSSYAMSWVRQAPGKGLEW | | CCGGCGGCGGGTTAGTCCA |
| | | VASISRGGTTYYADSVKGRFTISRD | | GCCCGGCGGGAGCTTGCGG |
| | | NSKNTLYLQMNSLRAEDTAVYYCG | | CTGTCCTGCGCCGCCTCTGG |
| | | RYDYDGYYAMDYWGQGTLVTVSS | | ATTCACTTTTAGCTCCTATG |
| | | | | CTATGTCTTGGGTAAGGCA |
| | | | | GGCCCCTGGTAAAGGACTA |
| | | | | GAGTGGGTGGCCTCGATCT |
| | | | | CCCGTGGTGGCACTACATA |
| | | | | CTACGCCGACTCCGTTAAAG |
| | | | | GCCGGTTTACCATCTCCCGT |
| | | | | GACAACTCTAAAAATACTTT |
| | | | | GTACCTGCAAATGAACTCCC |
| | | | | TGCGGGCAGAAGACACAGC |
| | | | | CGTGTACTATTGCGGGCGT |
| | | | | TACGATTACGACGGATATTA |
| | | | | CGCAATGGACTACTGGGGC |
| | | | | CAGGGCACACTGGTCACCG |
| | | | | TGAGCAGC |
| hROR1 | 399 | DIQMTQSPSSLSASVGDRVTITCKA | 400 | GATATACAAATGACTCAGTC |
| VL_14-3 | | SPDINSYLNWYQQKPGKAPKLLIYR | | CCCTAGTAGCCTTAGTGCTA |
| | | ANRLVDGVPSRFSGSGSGTDFTLTI | | GTGTGGGAGACAGAGTGAC |
| | | SSLQPEDIATYYCLQYDEFPYTFGG | | CATCACCTGCAAAGCATCTC |
| | | GTKVEIK | | CTGATATCAATTCCTACCTT |
| | | | | AACTGGTATCAACAGAAGC |
| | | | | CTGGCAAAGCTCCAAAGCT |
| | | | | CCTGATTTATCGCGCGAACA |
| | | | | GATTGGTCGATGGGGTCCC |
| | | | | TTCCAGATTCAGCGGCTCA |
| | | | | GGGTCAGGGACCGATTTCA |
| | | | | CCCTCACAATTAGTTCACTT |
| | | | | CAGCCCGAGGACATCGCCA |
| | | | | CGTATTATTGCCTTCAGTAC |
| | | | | GATGAGTTCCCTTACACCTT |
| | | | | TGGCGGGGGAACTAAAGTC |
| | | | | GAAATTAAG |
| hROR1 | 401 | EVQLVESGGGLVQPGGSLRLSCAA | 402 | GAAGTGCAGCTTGTGGAGT |
| VH_14-4 | | SGFTFSSYAMSWVRQAPGKGLEW | | CAGGAGGAGGGCTAGTTCA |
| | | VASISRGGTTYYPDSVKGRFTISRD | | GCCAGGCGGCTCTCTGAGA |
| | | NVRNILYLQMSSLRSEDTAMYYCG | | CTATCTTGTGCTGCCTCCGG |
| | | RYDYDGYYAMDYWGQGTLVTVSS | | CTTCACATTTAGCTCTTATG |
| | | | | CAATGTCCTGGGTCCGCCA |
| | | | | GGCCCCTGGTAAAGGCCTG |
| | | | | GAATGGGTTGCTTCTATCTC |
| | | | | TAGAGGCGGAACCACTTAC |
| | | | | TACCCTGATTCAGTGAAGG |
| | | | | GGAGATTCACAATTAGTAG |
| | | | | GGACAACGTGCGGAACATC |
| | | | | CTCTACCTACAGATGTCAAG |
| | | | | TTTACGCAGTGAGGACACT |
| | | | | GCGATGTATTACTGCGGTC |
| | | | | GATACGATTATGATGGATA |
| | | | | TTATGCAATGGATTATTGG |
| | | | | GGCCAGGGCACTCTGGTCA |
| | | | | CAGTATCTTCC |
| hROR1 | 403 | DIQMTQSPSSLSASVGDRVTITCKA | 404 | GACATCCAGATGACCCAAT |
| VL_14-4 | | SPDINSYLNWYQQKPGKAPKLLIYR | | CACCATCGAGTCTTAGTGCA |
| | | ANRLVDGVPSRFSGSGSGTDYTLTI | | TCCGTTGGGGATAGAGTGA |
| | | SSLQPEDFATYYCLQYDEFPYTFGA | | CAATCACTTGTAAGGCATCC |
| | | GTKVEIK | | CCGGACATCAACTCATATCT |
| | | | | TAATTGGTATCAGCAAAAG |
| | | | | CCGGGCAAGGCCCCTAAGC |
| | | | | TCCTGATTTATAGGGCCAAC |
| | | | | CGCCTTGTGGATGGAGTCC |
| | | | | CCTCCCGCTTTAGTGGAAGC |
| | | | | GGCTCTGGCACAGACTACA |
| | | | | CCCTGACTATCAGCTCCTTG |
| | | | | CAGCCTGAGGATTTTGCTAC |
| | | | | CTACTACTGTCTTCAGTACG |
| | | | | ATGAATTTCCATACACTTTC |
| | | | | GGTGCTGGGACAAAAGTGG |
| | | | | AGATCAAA |
| hROR1 | 405 | EVQLVESGGGLVQPGGSLRLSCAT | 406 | GAAGTCCAGCTGGTTGAGT |
| VH_14-5 | | SGFTFSSYAMSWMRKAPGKGLEY | | CTGGCGGAGGCCTCGTGCA |
| | | VASISRGGTTYYADSVKGRFTISVDK | | GCCCGGTGGTTCCTTGCGA |
| | | SKNTLYLQMNSLRAEDTAVYYCGR | | CTGTCATGCGCTACCAGCG |
| | | YDYDGYYAMDYWGQGTLVTVSS | | GGTTCACATTCAGCTCTTAT |
| | | | | GCAATGTCCTGGATGCGGA |
| | | | | AGGCACCGGGTAAGGGCCT |
| | | | | GGAGTATGTGGCCTCAATC |
| | | | | TCCCGAGGAGGCACCACAT |
| | | | | ACTATGCCGATTCTGTGAAA |
| | | | | GGCCGATTCACCATTTCTGT |
| | | | | GGATAAGTCTAAAAACACT |
| | | | | CTCTACCTCCAGATGAACTC |
| | | | | CCTACGTGCCGAAGACACA |
| | | | | GCCGTGTATTATTGCGGGC |
| | | | | GATACGATTATGACGGTTA |
| | | | | TTATGCGATGGATTACTGG |
| | | | | GGTCAAGGCACACTGGTAA |
| | | | | CAGTGTCTTCC |
| hROR1 | 407 | DIQMTQSPSSLSASVGDRVTITCKA | 408 | GATATTCAGATGACACAATC |
| VL_14-5 | | SPDINSYLNWYQQKPGKAPKLLIYR | | ACCTAGCTCACTGTCAGCGA |
| | | ANRLVDGVPSRFSGSGSGTDYTLTI | | GCGTCGGTGACCGGGTTAC |
| | | SSLQPEDFATYYCLQYDEFPYTFGA | | TATCACATGCAAAGCCTCAC |
| | | GTKVEIK | | CCGATATCAATTCATACCTT |
| | | | | AACTGGTATCAACAAAAAC |
| | | | | CAGGAAAGGCTCCAAAGCT |
| | | | | GCTAATTTATCGGGCCAATC |
| | | | | GGTTGGTGGATGGCGTCCC |
| | | | | GTCGAGGTTTAGTGGCTCC |
| | | | | GGGAGCGGGACAGACTAC |
| | | | | ACTCTTACAATTTCTTCTCTC |
| | | | | CAGCCAGAGGACTTCGCAA |
| | | | | CCTACTACTGCTTGCAGTAC |
| | | | | GATGAATTTCCATATACCTT |
| | | | | CGGCGCAGGGACAAAAGT |
| | | | | GGAAATCAAA |
| hROR1 VH_15 | 409 | EVQLVESGGGLVQPGGSLRLSCVTS | 410 | GAGGTGCAGCTTGTAGAAA |
| | | GFTFSSYAMSWVRQAPGKGLEWV | | GCGGGGGGGGCCTGGTGC |
| | | ASISRGGTTYYSDSVKGRFTISRDNS | | AACCTGGCGGGTCCCTGCG |
| | | KNTLYLQMNSLRAEDTAVYYCGRY | | GCTTAGTTGCGTTACGAGC |
| | | DYDGYYAMDYWGQGTLVTVSS | | GGATTTACATTTTCCAGTTA |
| | | | | TGCCATGTCTTGGGTGAGA |
| | | | | CAAGCCCCCGGTAAGGGTC |
| | | | | TGGAGTGGGTGGCAAGCAT |
| | | | | TAGCCGAGGCGGCACTACA |
| | | | | TACTACAGTGATAGTGTGA |
| | | | | AAGGCCGTTTCACAATCAGT |
| | | | | AGAGATAATTCTAAAAACA |
| | | | | CCCTGTACTTGCAGATGAAC |
| | | | | AGCCTGCGCGCCGAGGATA |
| | | | | CAGCCGTGTACTACTGTGG |
| | | | | AAGATACGACTACGATGGA |
| | | | | TATTATGCGATGGATTACTG |
| | | | | GGGACAGGGAACCCTTGTC |
| | | | | ACCGTTTCCTCT |
| hROR1 VL_15 | 411 | DIVLTQSPATLSLSPGERATLSCKAS | 412 | GACATAGTGTTGACGCAGT |
| | | PDINSYMNWYQQKPGQAPRLLISR | | CCCCTGCCACCCTGAGCCTG |
| | | ANRLVDGVPARFSGSGSGTDFTLTI | | AGCCCCGGAGAGCGAGCAA |
| | | SSLEPEDFAVYYCLQYDEFPYTFGQ | | CGTTAAGTTGCAAGGCCAG |
| | | GTKVEIK | | TCCAGATATTAACTCATACA |
| | | | | TGAATTGGTATCAACAGAA |
| | | | | ACCAGGCCAGGCTCCTAGA |
| | | | | CTTCTCATATCTCGGGCAAA |
| | | | | TCGACTGGTGGATGGAGTA |
| | | | | CCCGCAAGATTCAGCGGCA |
| | | | | GCGGCAGCGGAACGGATTT |
| | | | | CACGCTCACCATCTCTTCCC |
| | | | | TTGAGCCTGAGGACTTTGC |
| | | | | AGTCTATTATTGCTTGCAGT |
| | | | | ATGATGAGTTCCCCTACACA |
| | | | | TTCGGGCAAGGCACAAAAG |
| | | | | TGGAAATTAAG |
| hROR1 VH_16 | 413 | EVQLVESGGGLVQPGGSLRLSCAA | 414 | GAGGTGCAGCTGGTGGAG |
| | | SGFTFSSYAMSWVRQAPGKGLEW | | AGCGGAGGGGGCCTTGTCC |
| | | VASISRGGTTYYDPKFQDRATISAD | | AACCAGGAGGTAGCCTCAG |
| | | NSKNTAYLQMNSLRAEDTAVYYCG | | GCTGTCTTGCGCTGCCTCAG |
| | | RYDYDGYYAMDYWGQGTLVTVSS | | GATTTACTTTTTCATCCTAC |
| | | | | GCAATGAGCTGGGTGCGGC |
| | | | | AAGCCCCAGGGAAGGGATT |
| | | | | AGAATGGGTTGCCAGCATT |
| | | | | TCTAGGGGGGGGACGACCT |
| | | | | ACTACGATCCGAAGTTTCAG |
| | | | | GATCGCGCCACTATCTCAGC |
| | | | | CGATAACTCCAAGAATACT |
| | | | | GCCTACTTACAGATGAACA |
| | | | | GCCTGCGGGCCGAAGACAC |
| | | | | GGCCGTCTACTATTGCGGC |
| | | | | CGATATGATTACGACGGCT |
| | | | | ATTACGCCATGGATTACTG |
| | | | | GGGGCAAGGGACTCTGGTC |
| | | | | ACAGTGAGCTCT |
| hROR1 VL_16 | 415 | DIQMTQSPSSLSASVGDRVTITCKA | 416 | GATATTCAGATGACCCAGTC |
| | | SPDINSYLNWYQQKPGKAPKVLIYR | | GCCCAGCAGTCTCTCGGCCT |
| | | ANRLVDGVPSRFSGSGSGTDYTLTI | | CAGTGGGCGACCGGGTCAC |
| | | SSLQPEDFATYYCLQYDEFPYTFGQ | | TATCACTTGCAAAGCAAGTC |
| | | GTKVEIK | | CTGATATAAACTCCTATCTT |
| | | | | AATTGGTATCAGCAGAAGC |
| | | | | CCGGCAAGGCACCTAAGGT |
| | | | | TCTGATATATCGCGCAAATC |
| | | | | GGCTCGTGGATGGAGTACC |
| | | | | CAGCCGATTTTCCGGCAGC |
| | | | | GGCTCAGGCACTGACTACA |
| | | | | CACTGACAATCAGCAGCTT |
| | | | | GCAGCCTGAAGATTTCGCC |
| | | | | ACATACTATTGTCTACAGTA |
| | | | | CGACGAGTTCCCTTATACAT |
| | | | | TCGGCCAGGGGACCAAGGT |
| | | | | CGAGATCAAG |
| hROR1 VH_17 | 417 | EVQLVESGGGLVQPGGSLRLSCTG | 418 | GAGGTCCAACTCGTGGAGA |
| | | SGFTFSSYAMSWLRQVPGEGLEW | | GCGGAGGGGGGCTAGTGC |
| | | VSSISRGGTTDYADSVKGRFTISRD | | AACCAGGTGGCTCCCTCCG |
| | | DAKKTLSLQMNSLRAEDTAVYYCG | | CTTGTCCTGTACGGGCTCG |
| | | RYDYDGYYAMDYWGQGTMVTVSS | | GGGTTCACATTTTCATCCTA |
| | | | | TGCCATGAGCTGGCTGAGA |
| | | | | CAGGTGCCTGGCGAGGGCC |
| | | | | TGGAATGGGTGTCTAGTAT |
| | | | | CAGCAGAGGGGGTACAACT |
| | | | | GATTACGCAGATTCCGTCAA |
| | | | | GGGACGTTTTACCATCTCAA |
| | | | | GAGACGATGCCAAGAAGAC |
| | | | | ATTATCACTCCAAATGAACT |
| | | | | CACTGAGGGCCGAGGACAC |
| | | | | CGCTGTGTACTATTGTGGG |
| | | | | AGATACGACTACGACGGAT |
| | | | | ACTATGCCATGGACTATTG |
| | | | | GGGACAAGGCACGATGGT |
| | | | | GACGGTATCTAGC |
| hROR1 VL_17 | 419 | EIVLTQSPATLSVSPGERATLSCKAS | 420 | GAGATAGTGCTAACCCAGT |
| | | PDINSYLAWYQQKPGQAPRLLFSR | | CTCCCGCAACCCTGTCTGTG |
| | | ANRLVDGIPARFTGSGSGTDFTLTIS | | TCCCCCGGAGAGCGCGCTA |
| | | SLEPEDFAIYYCLQYDEFPYTFGQGT | | CTCTGAGCTGCAAAGCCAG |
| | | KVEIK | | CCCGGACATTAATTCCTACC |
| | | | | TTGCCTGGTATCAGCAGAA |
| | | | | GCCTGGACAGGCCCCAAGA |
| | | | | TTGCTCTTTTCACGCGCCAA |
| | | | | CCGCCTGGTAGATGGTATT |
| | | | | CCAGCTAGGTTTACGGGCT |
| | | | | CAGGCAGCGGAACAGACTT |
| | | | | CACTCTCACTATTAGCTCAT |
| | | | | TGGAGCCTGAGGACTTTGC |
| | | | | AATTTACTATTGTCTTCAGT |
| | | | | ACGACGAGTTCCCATATACT |
| | | | | TTCGGCCAGGGCACAAAAG |
| | | | | TAGAGATCAAG |
| hROR1 VH_18 | 421 | EVQLVESGGGLVQPGGSLRLSCSAS | 422 | GAGGTTCAACTCGTGGAGT |
| | | GFTFSSYAMSWVRQVPGKGLVWI | | CTGGAGGCGGGCTAGTGCA |
| | | SSISRGGTTYYADSVRGRFIISRDNA | | GCCTGGCGGCTCCCTGCGA |
| | | KNTLYLEMNNLRGEDTAVYYCARY | | CTGTCTTGCAGCGCATCAG |
| | | DYDGYYAMDYWGQGTLVTVSS | | GCTTTACATTCAGTTCTTAT |
| | | | | GCCATGAGCTGGGTGAGGC |
| | | | | AGGTGCCCGGCAAGGGTCT |
| | | | | GGTGTGGATCAGCTCAATC |
| | | | | TCCAGGGGCGGGACTACAT |
| | | | | ATTACGCCGATTCGGTCAG |
| | | | | GGGTCGTTTTATCATTAGCA |
| | | | | GGGATAATGCCAAGAACAC |
| | | | | CTTGTATTTGGAGATGAAC |
| | | | | AACCTAAGAGGCGAAGACA |
| | | | | CCGCTGTGTACTATTGTGCC |
| | | | | CGTTACGACTACGATGGGT |
| | | | | ACTACGCCATGGACTATTG |
| | | | | GGGCCAGGGAACCTTGGTG |
| | | | | ACTGTGTCAAGT |
| hROR1 VL_18 | 423 | DIQLTQSPDSLAVSLGERATINCKAS | 424 | GACATACAGTTGACTCAGTC |
| | | PDINSYLSWYQQRPGQPPRLLIHR | | ACCGGATTCGCTGGCAGTT |
| | | ANRLVDGVPDRFSGSGFGTDFTLTI | | TCGCTGGGTGAGAGAGCAA |
| | | TSLQAEDVAIYYCLQYDEFPYTFGQ | | CCATCAACTGCAAAGCATCT |
| | | GTKLEIK | | CCCGATATCAACTCTTATCT |
| | | | | GTCTTGGTATCAGCAGCGT |
| | | | | CCGGGACAACCCCCTAGGC |
| | | | | TGCTTATTCACCGAGCCAAC |
| | | | | AGGCTGGTGGACGGGGTG |
| | | | | CCAGACCGCTTCTCGGGAT |
| | | | | CAGGATTTGGAACCGATTTT |
| | | | | ACCCTAACAATTACTAGTCT |
| | | | | CCAAGCGGAAGACGTGGCG |
| | | | | ATCTATTATTGTCTACAATA |
| | | | | TGACGAGTTCCCCTACACCT |
| | | | | TCGGCCAGGGCACGAAGTT |
| | | | | GGAGATCAAG |
| hROR1 VH_19 | 425 | EVQLVESGGGLVQPGGSLRLSCAA | 426 | GAGGTCCAGCTCGTCGAAT |
| | | SGFTFSSYAMSWVRQAPGKGLEW | | CCGGTGGAGGGCTAGTTCA |
| | | VASISRGGTTYYADSVKGRFTISADT | | GCCAGGCGGCTCATTGCGT |
| | | SKNTAYLQMNSLRAEDTAVYYCAR | | TTGTCTTGTGCCGCCTCCGG |
| | | YDYDGYYAMDYWGQGTLVTVSS | | TTTCACATTCTCTTCTTACGC |
| | | | | TATGTCCTGGGTCCGACAA |
| | | | | GCCCCAGGAAAAGGCTTGG |
| | | | | AATGGGTGGCCAGTATCAG |
| | | | | TAGAGGTGGGACTACATAT |
| | | | | TATGCCGACTCCGTGAAGG |
| | | | | GCAGATTCACCATCTCAGCT |
| | | | | GACACCAGTAAGAACACTG |
| | | | | CCTACCTACAGATGAACAG |
| | | | | CCTTCGGGCCGAGGACACC |
| | | | | GCTGTGTATTACTGTGCCCG |
| | | | | GTACGATTATGATGGATATT |
| | | | | ATGCTATGGACTATTGGGG |
| | | | | TCAGGGGACCTTGGTGACC |
| | | | | GTCTCTAGC |
| hROR1 VL_19 | 427 | DIQMTQSPSSLSASVGDRVTITCKA | 428 | GACATTCAGATGACTCAATC |
| | | SPDINSYLSWYQQKPGKAPKLLIYR | | GCCGAGTTCTCTTAGCGCTT |
| | | ANRLVDGVPSRFSGSGSGTDFTLTI | | CTGTTGGGGACCGGGTGAC |
| | | SSLQPEDFATYYCLQYDEFPYTFGQ | | AATCACATGCAAGGCCTCTC |
| | | GTKVEIK | | CCGATATAAACTCCTATCTA |
| | | | | AGCTGGTATCAGCAGAAGC |
| | | | | CAGGGAAGGCCCCCAAGTT |
| | | | | GTTAATCTATCGCGCCAACA |
| | | | | GACTGGTGGATGGGGTGCC |
| | | | | CTCTCGATTCTCCGGGAGTG |
| | | | | GCAGTGGGACTGATTTTAC |
| | | | | ACTGACCATTTCCTCATTGC |
| | | | | AGCCCGAAGACTTCGCTAC |
| | | | | CTATTACTGCTTGCAGTACG |
| | | | | ATGAGTTCCCATATACATTC |
| | | | | GGTCAGGGGACTAAAGTGG |
| | | | | AGATAAAA |
| hROR1 VH_20 | 429 | EVQLLESGGGLVQPGGSLRLSCAAS | 430 | GAGGTACAGCTGCTGGAAT |
| | | GFTFSSYAMSWVRQAPGKGLEWV | | CTGGTGGGGGGCTGGTCCA |
| | | SSISRGGTTYYADSVKGRFTISRDNS | | GCCAGGGGGGTCACTACGA |
| | | KNTLYLQMNSLRAEDTAVYYCARY | | CTGAGCTGCGCTGCCTCCG |
| | | DYDGYYAMDYWGQGTLVTVSS | | GTTTTACATTCAGCAGCTAT |
| | | | | GCAATGTCATGGGTCAGAC |
| | | | | AGGCACCAGGTAAAGGCCT |
| | | | | CGAATGGGTATCCTCCATCT |
| | | | | CACGTGGTGGGACCACTTA |
| | | | | CTATGCCGATAGTGTGAAG |
| | | | | GGCAGGTTCACGATCTCAA |
| | | | | GAGATAATTCAAAGAATAC |
| | | | | ACTCTATCTACAAATGAACA |
| | | | | GTTTAAGGGCCGAGGACAC |
| | | | | CGCTGTTTACTATTGTGCCA |
| | | | | GATATGACTACGACGGTTA |
| | | | | TTATGCTATGGATTACTGGG |
| | | | | GACAAGGAACGCTGGTAAC |
| | | | | TGTTAGCTCT |
| hROR1 VL_20 | 431 | DIQMTQSPSSLSASVGDRVTITCKA | 432 | GACATCCAAATGACCCAGT |
| | | SPDINSYLSWYQQKPGEAPKLLIYR | | CGCCTTCCTCCTTGTCTGCA |
| | | ANRLVDGVPSRFSGSGSGTDFTLTI | | TCTGTCGGAGATCGGGTGA |
| | | SSLQPEDFATYYCLQYDEFPYTFGQ | | CGATCACTTGCAAAGCGAG |
| | | GTKVEIK | | TCCAGACATCAACTCATATC |
| | | | | TGTCCTGGTATCAGCAGAA |
| | | | | GCCGGGAGAGGCACCTAAG |
| | | | | CTCCTGATCTACAGAGCAAA |
| | | | | CAGATTAGTGGATGGTGTG |
| | | | | CCCTCACGGTTTTCTGGCTC |
| | | | | CGGGTCCGGCACCGATTTC |
| | | | | ACCTTGACCATCTCATCCCT |
| | | | | ACAGCCCGAGGATTTCGCT |
| | | | | ACTTACTATTGCTTACAGTA |
| | | | | TGATGAGTTTCCATACACCT |
| | | | | TCGGTCAAGGCACCAAGGT |
| | | | | TGAGATTAAG |
| hROR1 VH_21 | 433 | EVQLLETGGGLVKPGGSLRLSCAAS | 434 | GAAGTTCAACTGCTTGAGA |
| | | GFTFSSYAMSWIRQAPGKGLEWV | | CCGGAGGCGGCCTGGTAAA |
| | | ASISRGGTTYYGDSVKGRFTISRDH | | ACCTGGGGGCTCACTGAGG |
| | | AKNSLYLQMNSLRVEDTAVYYCVR | | CTGAGTTGTGCCGCTTCTGG |
| | | YDYDGYYAMDYWGLGTLVTVSS | | GTTCACCTTTTCATCCTATG |
| | | | | CGATGTCATGGATACGGCA |
| | | | | GGCTCCTGGGAAGGGGCTT |
| | | | | GAGTGGGTTGCATCAATTT |
| | | | | CACGAGGTGGGACAACTTA |
| | | | | TTATGGGGATTCCGTTAAA |
| | | | | GGTAGATTTACGATCTCTAG |
| | | | | AGACCATGCCAAAAATTCTC |
| | | | | TCTATCTCCAGATGAATAGT |
| | | | | CTTAGGGTGGAGGACACCG |
| | | | | CTGTGTACTACTGTGTCCGG |
| | | | | TACGACTATGATGGGTACT |
| | | | | ATGCTATGGACTATTGGGG |
| | | | | GCTCGGCACTCTGGTCACT |
| | | | | GTTAGCTCT |
| hROR1 VL_21 | 435 | AIRMTQSPSFLSASVGDRVTITCKA | 436 | GCCATCCGCATGACACAATC |
| | | SPDINSYLSWYQQRPGKAPKLLIYR | | TCCCTCCTTCCTTTCTGCCAG |
| | | ANRLVDGVPSRFSGGGSGTDFTLTI | | TGTCGGGGACAGAGTGACT |
| | | SSLQPEDIATYYCLQYDEFPYTFGQ | | ATCACATGCAAAGCCAGCC |
| | | GTKLEIK | | CAGATATTAATTCGTACCTG |
| | | | | TCTTGGTATCAGCAGAGGC |
| | | | | CCGGCAAGGCACCAAAGCT |
| | | | | GTTGATATATCGGGCCAAC |
| | | | | CGCTTAGTGGACGGTGTCC |
| | | | | CCTCTCGATTCAGCGGAGG |
| | | | | CGGTAGCGGGACGGACTTT |
| | | | | ACACTGACCATCTCCAGTCT |
| | | | | CCAACCCGAGGATATTGCC |
| | | | | ACTTACTATTGTCTTCAGTA |
| | | | | TGACGAGTTCCCCTACACAT |
| | | | | TTGGACAGGGCACCAAGCT |
| | | | | AGAAATTAAG |
| hROR1 VH_22 | 437 | EVQLVESGGGLVQPGGSLRLSCAA | 438 | GAGGTTCAGCTGGTGGAGT |
| | | SGFTFSSYAMSWVRQAPGKGLEW | | CTGGTGGGGGGCTCGTACA |
| | | VASISRGGTTYYAESLEGRFTISRDD | | GCCGGGTGGCTCCCTAAGG |
| | | SKNSLYLQMNSLKTEDTAVYYCARY | | CTGAGTTGCGCTGCCTCAG |
| | | DYDGYYAMDYWGQGTLVTVSS | | GCTTTACCTTCTCAAGCTAC |
| | | | | GCGATGTCCTGGGTGAGAC |
| | | | | AGGCCCCTGGCAAAGGACT |
| | | | | GGAGTGGGTGGCAAGCATT |
| | | | | AGCCGGGGCGGAACTACCT |
| | | | | ATTACGCTGAGTCGTTAGA |
| | | | | GGGGCGGTTTACTATCTCC |
| | | | | AGAGACGATTCAAAGAACT |
| | | | | CGTTATACTTGCAGATGAAC |
| | | | | AGCCTCAAGACCGAGGACA |
| | | | | CCGCCGTGTACTACTGCGCC |
| | | | | CGGTACGACTATGACGGGT |
| | | | | ACTATGCTATGGATTATTGG |
| | | | | GGACAAGGCACCCTCGTGA |
| | | | | CCGTCTCTAGC |
| hROR1 VL_22 | 439 | DIQMTQSPSSLSASVGDRVTITCKA | 440 | GACATCCAGATGACACAGT |
| | | SPDINSYLSWYQQKPGKAPKTLIYR | | CCCCTTCTTCACTTTCCGCTT |
| | | ANRLVDGVPSRFSGSGSGTDFTLTI | | CTGTGGGCGACAGGGTGAC |
| | | SSLQPEDFATYYCLQYDEFPYTFGQ | | GATCACGTGTAAGGCCTCG |
| | | GTKLEIK | | CCAGACATTAATTCGTACTT |
| | | | | ATCGTGGTATCAGCAGAAA |
| | | | | CCGGGTAAAGCTCCGAAGA |
| | | | | CTCTGATCTATAGAGCAAAT |
| | | | | AGGCTCGTAGACGGTGTCC |
| | | | | CATCTAGATTTAGTGGGAG |
| | | | | CGGCAGCGGAACCGACTTC |
| | | | | ACTCTCACCATCTCATCCCT |
| | | | | GCAACCGGAGGATTTCGCT |
| | | | | ACTTACTATTGCTTGCAGTA |
| | | | | TGACGAGTTTCCATATACGT |
| | | | | TTGGTCAGGGAACCAAATT |
| | | | | AGAGATCAAA |
| hROR1 VH_23 | 441 | QVTLRESGPALVKPTQTLTLTCAAS | 442 | CAGGTAACACTCCGAGAGA |
| | | GFTFSSYAMSWIRQPPGKALEWLA | | GTGGGCCAGCTCTCGTGAA |
| | | SISRGGTTYYNPSLKDRLTISKDTSA | | GCCCACGCAGACTTTAACAC |
| | | NQVVLKVTNMDPADTATYYCARY | | TAACGTGTGCGGCAAGCGG |
| | | DYDGYYAMDYWGQGTTVTVSS | | CTTTACATTTTCGAGCTACG |
| | | | | CGATGAGCTGGATAAGGCA |
| | | | | ACCTCCTGGGAAGGCGTTG |
| | | | | GAGTGGTTGGCCTCAATTA |
| | | | | GCCGGGGTGGCACCACTTA |
| | | | | CTACAATCCTAGTCTTAAGG |
| | | | | ACAGACTTACTATTTCAAAA |
| | | | | GATACGTCCGCCAACCAGG |
| | | | | TGGTACTGAAGGTCACAAA |
| | | | | TATGGACCCAGCTGACACT |
| | | | | GCTACTTACTACTGCGCCCG |
| | | | | GTACGATTACGATGGTTACT |
| | | | | ACGCTATGGATTACTGGGG |
| | | | | TCAAGGAACCACAGTGACC |
| | | | | GTCAGTTCA |
| hROR1 VL_23 | 443 | DIQMTQSPSTLSASVGDRVTITCKA | 444 | GATATCCAGATGACGCAGT |
| | | SPDINSYLSWYQQKPGKAPKLLIYR | | CCCCTTCAACCCTCAGTGCC |
| | | ANRLVDGVPSRFSGSGSGTAFTLTI | | AGCGTTGGTGACCGGGTTA |
| | | SSLQPDDFATYYCLQYDEFPYTFGG | | CTATCACCTGTAAGGCTAGT |
| | | GTKVEIK | | CCCGATATAAATTCCTATTT |
| | | | | GTCTTGGTATCAGCAGAAG |
| | | | | CCAGGCAAGGCTCCTAAGC |
| | | | | TGCTCATCTACCGGGCTAAC |
| | | | | AGGTTAGTTGACGGTGTGC |
| | | | | CCTCCCGATTTTCCGGCAGT |
| | | | | GGCAGCGGGACCGCTTTCA |
| | | | | CTCTTACAATCTCATCTCTTC |
| | | | | AACCGGACGACTTCGCTAC |
| | | | | GTACTACTGCCTCCAATATG |
| | | | | ATGAGTTTCCATACACATTC |
| | | | | GGAGGAGGCACAAAAGTC |
| | | | | GAAATCAAG |
| hROR1 VH_24 | 445 | EVQLVESGGGLVQPGGSLRLSCAA | 446 | GAAGTCCAGCTGGTGGAGT |
| | | SGFTFSSYAMSWVRQAPGKGLEW | | CCGGCGGAGGCTTGGTTCA |
| | | VSAISRGGTTYYADSVKGRFTISADT | | GCCCGGAGGATCTTTGCGA |
| | | SKETAYLQMNSLRAEDTAVYYCGR | | CTGTCTTGCGCCGCCAGCG |
| | | YDYDGYYAMDYWGQGTLVTVSS | | GTTTCACTTTCAGCAGCTAT |
| | | | | GCCATGAGTTGGGTTAGAC |
| | | | | AAGCTCCCGGCAAGGGGCT |
| | | | | GGAATGGGTTAGTGCTATT |
| | | | | AGCCGGGGAGGGACAACA |
| | | | | TATTACGCTGACTCTGTCAA |
| | | | | AGGCCGATTCACCATCTCTG |
| | | | | CTGACACGAGCAAAGAAAC |
| | | | | CGCCTACCTCCAAATGAACA |
| | | | | GCCTGCGAGCTGAGGACAC |
| | | | | TGCCGTCTACTATTGTGGTC |
| | | | | GATATGATTATGATGGGTA |
| | | | | CTATGCAATGGACTATTGG |
| | | | | GGGCAGGGCACACTGGTGA |
| | | | | CCGTGAGCTCT |
| hROR1 VL_24 | 447 | DIQMTQSPSSLSASVGDRVTITCKA | 448 | GATATTCAGATGACGCAGA |
| | | SPDINSYLSWYQQKPGKAPKLLIYR | | GTCCCTCCTCCCTATCTGCC |
| | | ANRLVDGVPSRFSGSGSGTDFTLTI | | TCTGTTGGAGATCGAGTCA |
| | | SSLQPEDIATYYCLQYDEFPYTFGQ | | CCATTACGTGTAAAGCGTCT |
| | | GTKLEIK | | CCCGATATCAACAGCTACCT |
| | | | | CTCTTGGTATCAGCAGAAAC |
| | | | | CAGGGAAGGCCCCCAAGCT |
| | | | | GCTGATCTATAGAGCTAATC |
| | | | | GCTTAGTGGATGGAGTGCC |
| | | | | AAGCAGGTTCTCCGGGTCC |
| | | | | GGCAGTGGAACCGATTTCA |
| | | | | CCTTGACAATAAGTAGCTTG |
| | | | | CAACCTGAGGATATTGCAA |
| | | | | CATACTACTGTCTACAGTAC |
| | | | | GACGAGTTCCCCTACACCTT |
| | | | | CGGCCAAGGGACAAAGCTG |
| | | | | GAGATTAAG |
| hROR1 VH_25 | 449 | EVQLVESGGGLVQPGGSLRLSCAA | 450 | GAAGTGCAGCTCGTGGAGA |
| | | SGFTFSSYAMSWVRQAPGKGLEW | | GCGGCGGCGGTCTGGTACA |
| | | VSAISRGGTTYYADSVKGRFTISRD | | GCCAGGGGGGTCACTGCGT |
| | | NSKNTLYLQMNSLRAEDTAVYYCG | | CTCTCATGTGCTGCGAGTG |
| | | RYDYDGYYAMDYWGQGTLVTVSS | | GCTTTACGTTCTCTTCCTAC |
| | | | | GCTATGTCCTGGGTCAGGC |
| | | | | AGGCACCGGGGAAGGGCTT |
| | | | | AGAGTGGGTTAGTGCAATC |
| | | | | TCTAGGGGCGGTACAACCT |
| | | | | ACTATGCCGACTCTGTCAAG |
| | | | | GGCAGGTTTACAATTTCAA |
| | | | | GAGATAATTCTAAGAATACT |
| | | | | CTTTACCTACAGATGAATAG |
| | | | | CTTGCGGGCGGAAGACACA |
| | | | | GCAGTCTATTATTGTGGCCG |
| | | | | CTATGACTACGACGGATACT |
| | | | | ATGCCATGGACTACTGGGG |
| | | | | CCAAGGCACTTTGGTCACG |
| | | | | GTGAGCTCT |
| hROR1 VL_25 | 451 | DIQMTQSPSSLSASVGDRVTITCKA | 452 | GACATCCAGATGACCCAGA |
| | | SPDINSYLSWYQQKPGKAPKLLIYR | | GCCCTAGTTCATTGTCTGCC |
| | | ANRLVDGVPSRFSGSGSGTDFTLTI | | AGTGTGGGGGATAGGGTC |
| | | SSLQPEDIATYYCLQYDEFPYTFGQ | | ACTATCACGTGTAAGGCTTC |
| | | GTKLEIK | | CCCTGACATCAATTCATACC |
| | | | | TGTCATGGTATCAGCAGAA |
| | | | | GCCTGGAAAAGCCCCTAAA |
| | | | | CTGCTGATCTACCGCGCGA |
| | | | | ATAGGCTTGTGGACGGCGT |
| | | | | TCCAAGCCGCTTCTCTGGCT |
| | | | | CTGGATCAGGGACCGACTT |
| | | | | CACCCTCACGATCTCCAGCC |
| | | | | TCCAACCCGAGGATATCGC |
| | | | | CACCTATTATTGCCTTCAGT |
| | | | | ACGATGAGTTCCCCTATACA |
| | | | | TTCGGCCAGGGGACAAAGC |
| | | | | TGGAAATCAAA |
| hROR1 VH_26 | 453 | EVQLVESGGGLVQPGGSLRLSCAA | 454 | GAGGTCCAGCTCGTCGAGT |
| | | SGFTFSSYAMSWVRQAPGKGLEW | | CGGGTGGGGGCTTGGTGCA |
| | | VSAISRGGTTYYADSVKGRFTISADT | | ACCCGGTGGCAGTTTGCGC |
| | | SKETAYLQMNSLRAEDTAVYYCGR | | CTGAGCTGCGCCGCGAGCG |
| | | YDYDGYYAMDYWGQGTLVTVSS | | GGTTCACTTTCAGTTCGTAT |
| | | | | GCCATGAGTTGGGTGCGAC |
| | | | | AAGCGCCCGGCAAAGGACT |
| | | | | GGAGTGGGTGTCAGCCATT |
| | | | | AGCCGGGGCGGTACTACCT |
| | | | | ACTATGCGGACTCGGTCAA |
| | | | | GGGAAGATTCACCATCAGC |
| | | | | GCTGATACCAGTAAGGAAA |
| | | | | CCGCTTATCTTCAGATGAAC |
| | | | | TCCCTGCGTGCCGAGGATA |
| | | | | CAGCAGTCTACTATTGCGG |
| | | | | GCGCTACGATTATGACGGA |
| | | | | TATTATGCCATGGATTACTG |
| | | | | GGGGCAGGGCACTCTGGTC |
| | | | | ACAGTCAGCTCT |
| hROR1 VL_26 | 455 | DIQMTQSPSSLSASVGDRVTITCQA | 456 | GATATTCAGATGACGCAGT |
| | | SPDINSYLNWYQQKPGKAPKLLIYR | | CTCCCTCTTCCCTGAGCGCC |
| | | ANNLETGVPSRFSGSGSGTDFTLTI | | TCCGTCGGCGATAGAGTTA |
| | | SSLQPEDIATYYCLQYDEFPYTFGQ | | CGATCACCTGTCAGGCCAG |
| | | GTKLEIK | | CCCAGATATCAACTCCTATC |
| | | | | TGAATTGGTATCAGCAAAA |
| | | | | GCCTGGGAAGGCTCCCAAG |
| | | | | TTGCTGATCTACAGAGCCAA |
| | | | | TAACTTAGAGACTGGCGTG |
| | | | | CCGTCTCGGTTCAGCGGGT |
| | | | | CCGGCAGTGGAACCGACTT |
| | | | | TACACTGACCATTTCCAGCC |
| | | | | TCCAACCTGAGGATATCGCC |
| | | | | ACATATTATTGTCTCCAGTA |
| | | | | TGACGAGTTCCCTTACACAT |
| | | | | TTGGTCAAGGAACTAAACT |
| | | | | GGAAATCAAA |
| hROR1 VH_27 | 457 | EVQLVESGGGLVQPGGSLRLSCAA | 458 | GAGGTGCAGCTGGTCGAAA |
| | | SGFTFSSYAMSWVRQAPGKGLEW | | GTGGAGGCGGACTCGTGCA |
| | | VSAISRGGTTYYADSVKGRFTISADT | | GCCCGGCGGTAGTCTGCGA |
| | | SKETAYLQMNSLRAEDTAVYYCGR | | TTGAGCTGTGCCGCGTCCG |
| | | YDYDGYYAMDYWGQGTLVTVSS | | GCTTTACTTTCTCATCTTACG |
| | | | | CTATGAGTTGGGTCCGCCA |
| | | | | GGCCCCAGGCAAAGGACTG |
| | | | | GAGTGGGTATCAGCCATCA |
| | | | | GTAGGGGGGGAACTACCTA |
| | | | | TTACGCAGATTCTGTGAAG |
| | | | | GGACGCTTCACCATCAGCG |
| | | | | CGGACACTAGCAAGGAGAC |
| | | | | TGCCTACCTGCAAATGAATA |
| | | | | GTCTGAGAGCCGAGGATAC |
| | | | | CGCCGTGTACTATTGTGGC |
| | | | | AGGTATGACTACGATGGCT |
| | | | | ATTATGCTATGGATTACTGG |
| | | | | GGCCAGGGGACGTTAGTGA |
| | | | | CAGTAAGCTCT |
| hROR1 VL_27 | 459 | DIQMTQSPSSLSASVGDRVTITCRA | 460 | GATATTCAGATGACCCAATC |
| | | SPDINSYVAWYQQKPGKAPKLLIYR | | CCCTTCTTCTCTGAGCGCTT |
| | | ANFLESGVPSRFSGSRSGTDFTLTIS | | CTGTGGGCGATAGAGTTAC |
| | | SLQPEDFATYYCLQYDEFPYTFGQG | | AATAACCTGTCGGGCGTCC |
| | | TKVEIK | | CCAGACATTAACTCTTATGT |
| | | | | AGCATGGTATCAGCAAAAG |
| | | | | CCTGGAAAGGCACCAAAGT |
| | | | | TACTGATCTACCGGGCCAAT |
| | | | | TTTCTGGAGTCGGGCGTGC |
| | | | | CCTCACGATTTAGCGGTAG |
| | | | | CAGATCAGGCACAGACTTT |
| | | | | ACTCTGACCATTAGCTCTCT |
| | | | | GCAACCCGAGGACTTCGCC |
| | | | | ACCTACTACTGTTTGCAGTA |
| | | | | TGACGAGTTTCCATACACTT |
| | | | | TTGGTCAAGGAACCAAAGT |
| | | | | CGAAATCAAA |
| hROR1 VH_28 | 461 | QIQLVQSGAEVKKPGASVKVSCAA | 462 | CAGATACAGCTGGTGCAGT |
| | | SGFTFSSYAMSWVRQAPGKSFKW | | CTGGTGCCGAGGTTAAAAA |
| | | MGSISRGGTTYYSADFKGRFAITKD | | GCCCGGAGCCTCGGTTAAA |
| | | TSASTAYMELSSLRSEDTAVYYCAR | | GTGAGTTGTGCGGCAAGCG |
| | | YDYDGYYAMDYWGQGTLVTVSS | | GATTCACGTTCAGTTCCTAC |
| | | | | GCTATGTCCTGGGTGCGGC |
| | | | | AGGCTCCTGGCAAGTCATTT |
| | | | | AAGTGGATGGGGTCGATCT |
| | | | | CACGGGGTGGAACCACCTA |
| | | | | TTACTCTGCCGACTTCAAGG |
| | | | | GGAGATTTGCGATTACAAA |
| | | | | AGATACAAGCGCCTCTACG |
| | | | | GCCTACATGGAGTTAAGTA |
| | | | | GCCTTAGAAGCGAAGACAC |
| | | | | GGCGGTGTACTACTGCGCC |
| | | | | AGATATGACTATGACGGCT |
| | | | | ACTACGCCATGGACTACTG |
| | | | | GGGCCAGGGCACACTGGTT |
| | | | | ACAGTCAGCTCT |
| hROR1 VL_28 | 463 | DIVMTQSPDSLAVSLGERATISCKA | 464 | GATATCGTGATGACACAAA |
| | | SPDINSYLSWYQQKPGQPPKLLIYR | | GCCCAGACAGTCTGGCAGT |
| | | ANRLVDGVPDRFSGSGSRTDFTLTI | | GTCCCTCGGCGAGCGCGCT |
| | | SSLQAEDVAVYYCLQYDEFPYTFGQ | | ACCATCTCATGCAAAGCTAG |
| | | GTKVEIK | | TCCCGACATCAATTCCTATC |
| | | | | TGTCCTGGTATCAGCAAAA |
| | | | | ACCAGGCCAACCCCCCAAG |
| | | | | CTGCTTATCTATCGGGCTAA |
| | | | | CCGATTAGTCGATGGGGTG |
| | | | | CCAGATAGATTTTCAGGCTC |
| | | | | TGGTTCCCGGACAGATTTTA |
| | | | | CTCTCACGATCTCCTCACTA |
| | | | | CAGGCAGAAGATGTTGCAG |
| | | | | TGTATTACTGCCTGCAATAC |
| | | | | GACGAGTTCCCCTACACCTT |
| | | | | CGGCCAAGGCACGAAAGTG |
| | | | | GAGATCAAG |
| hROR scFv | 465 | EVQLVESGGGLVQPGGSLRLSCAA | 466 | GAAGTGCAACTGGTCGAGT |
| | | SGFTFSSYAMSWVRQAPGKGLEW | | CTGGGGGCGGCCTTGTGCA |
| | | VSSISRGGTTYYPDSVKGRFTISRDN | | ACCTGGAGGCAGCCTTCGA |
| | | SKNTLYLQMNSLRAEDTAVYYCGR | | CTCAGTTGCGCCGCGTCTG |
| | | YDYDGYYAMDYWGQGTLVTVSSG | | GTTTTACCTTCTCCTCTTACG |
| | | GGGSGGGGSGGGGSDIQMTQSPS | | CGATGAGCTGGGTTCGCCA |
| | | SLSASVGDRVTITCKASPDINSYLN | | GGCCCCCGGCAAGGGACTT |
| | | WYQQKPGKAPKLLIYRANRLVDGV | | GAGTGGGTTAGTTCGATCT |
| | | PSRFSGSGSGTDYTLTISSLQPEDFA | | CCCGCGGAGGCACCACATA |
| | | TYYCLQYDEFPYTFGAGTKVEIK | | TTATCCTGACTCGGTTAAGG |
| | | | | GACGCTTCACTATCTCTAGG |
| | | | | GACAATTCAAAGAACACAC |
| | | | | TGTATCTCCAAATGAACTCC |
| | | | | TTGCGGGCCGAGGACACTG |
| | | | | CTGTGTATTATTGCGGACG |
| | | | | ATACGACTACGATGGGTAT |
| | | | | TACGCCATGGATTACTGGG |
| | | | | GGCAAGGTACACTGGTCAC |
| | | | | TGTGAGTTCG |
| | | | | GGGGGCGGCGGAAGTGGT |
| | | | | GGAGGGGGAAGTGGTGGA |
| | | | | GGAGGAAGCGATATACAGA |
| | | | | TGACACAGAGCCCTTCAAG |
| | | | | TTTATCTGCAAGCGTCGGC |
| | | | | GATCGTGTTACAATAACTTG |
| | | | | CAAGGCATCTCCCGACATCA |
| | | | | ATTCCTACCTCAACTGGTAT |
| | | | | CAGCAGAAGCCTGGGAAG |
| | | | | GCTCCTAAGCTGCTTATTTA |
| | | | | CAGAGCAAATCGCCTGGTG |
| | | | | GACGGCGTGCCCAGTCGGT |
| | | | | TTTCCGGGTCTGGGAGCGG |
| | | | | AACGGATTACACACTGACC |
| | | | | ATCTCAAGCCTGCAACCCGA |
| | | | | AGACTTCGCTACATATTACT |
| | | | | GCCTTCAGTATGATGAGTTC |
| | | | | CCATATACCTTCGGCGCTGG |
| | | | | GACCAAGGTGGAGATAAAG |

[0821] Anti-ROR1 CDRs

| | | SEQ ID NO |
|---|---|---|
| IMGT Method | | |
| VH-CDR-1 | GFTFSSYA | 715 |
| VH-CDR-2 | ISRGGTT | 716 |
| VH-CDR-3 | GRYDYDGYYAMDY | 717 |
| Kabat Method | | |
| VH-CDR-1 | SYAMS | 718 |
| VH-CDR-2 | AISRGGTTYYADSVKG | 719 |
| VH-CDR-3 | YDYDGYYAMDY | 720 |
| IMGT Method | | |
| VL-CDR-1 | PDINSY | 721 |
| VL-CDR-2 | RAN | 722 |
| VL-CDR-3 | LQYDEFPYT | 723 |
| Kabat Method | | |
| VL-CDR-1 | RASPDINSYLS | 724 |
| VL-CDR-2 | RANTLES | 725 |
| VL-CDR-3 | LQYDEFPYT | 723 |

[0822] Portions of ROR1-specific antigen binding domain

| | | |
|---|---|---|
| Portion of VH | GFTFSSYAMSWVRQAPGKGLEWVSSISRGGTTYYPDSVKGRFT | SEQ ID NO: 726 |
| Domain | ISRDNSKNTLYLQMNSLRAEDTAVYYCGRYDYDGYYAMDY | |
| Portion of VL | ASPDINSYLNWYQQKPGKAPKLLIYRANRLVDGVPSRFSGSGS | SEQ ID NO: 727 |
| Domain | GTDYTLTISSLQPEDFATYYCLQYDEFPYT | |
| Portion of VH | SYAMSWVRQAPGKGLEWVSSISRGGTTYYPDSVKGRFTISRDN | SEQ ID NO: 728 |
| Domain | SKNTLYLQMNSLRAEDTAVYYCGRYDYDGYYAMDY | |
| Portion of VL | PDINSYLNWYQQKPGKAPKLLIYRANRLVDGVPSRFSGSGSGT | SEQ ID NO: 729 |
| Domain | DYTLTISSLQPEDFATYYCLQYDEFPYT | |

[0823] Exemplary Spacer Sequences

| | | | | |
|---|---|---|---|---|
| CD8α hinge | 467 | KPTTTPAPRPPTPAPTIASQPLSLRP | 468 | AAGCCCACCACCACCCCTGC |
| | | EACRPAAGGAVHTRGLDFACD | | CCCTAGACCTCCAACCCCAG |
| | | | | CCCCTACAATCGCCAGCCAG |
| | | | | CCCCTGAGCCTGAGGCCCG |
| | | | | AAGCCTGTAGACCTGCCGC |
| | | | | TGGCGGAGCCGTGCACACC |
| | | | | AGAGGCCTGGATTTCGCCT |
| | | | | GCGAC |
| CD8α hinge- | 469 | KPTTTPAPRPPTPAPTIASQPLSLRP | 470 | AAGCCTACCACCACCCCCGC |
| homologous | | EASRPAAGGAVHTRGLDFASD | | ACCTCGTCCTCCAACCCCTG |
| stalk | | | | CACCTACGATTGCCAGTCAG |
| extension | | | | CCTCTTTCACTGCGGCCTGA |
| region | | | | GGCCAGCAGACCAGCTGCC |
| | | | | GGCGGTGCCGTCCATACAA |
| | | | | GAGGACTGGACTTCGCGTC |
| | | | | CGAT |
| CD8α hinge- | 469 | KPTTTPAPRPPTPAPTIASQPLSLRP | 471 | AAACCTACTACCACTCCAGC |
| homologous | | EASRPAAGGAVHTRGLDFASD | | CCCAAGGCCCCCAACCCCA |
| stalk | | | | GCACCGACTATCGCATCACA |
| extension | | | | GCCTTTGTCACTGCGTCCTG |
| region | | | | AAGCCAGCCGGCCAGCTGC |
| | | | | AGGGGGGGCCGTCCACACA |
| | | | | AGGGGACTCGACTTTGCGA |
| | | | | GTGAT |
| CD8α hinge- | 469 | KPTTTPAPRPPTPAPTIASQPLSLRP | 472 | AAACCTACTACAACTCCTGC |
| homologous | | EASRPAAGGAVHTRGLDFASD | | CCCCCGGCCTCCTACACCAG |
| stalk | | | | CTCCTACTATCGCCTCCCAG |
| extension | | | | CCACTCAGTCTCAGACCCGA |
| region | | | | GGCTTCTAGGCCAGCGGCC |
| | | | | GGAGGCGCGGTCCACACCC |
| | | | | GCGGGCTGGACTTTGCATC |
| | | | | CGAT |
| CD8α hinge | 473 | KPTTTPAPRPPTPAPTIASOPLSLRP | 474 | AAGCCTACCACCACCCCCGC |
| and 2 CD8a- | | EASRPAAGGAVHTRGLDFASDKPT | | ACCTCGTCCTCCAACCCCTG |
| homologous | | TTPAPRPPTPAPTIASQPLSLRPEAS | | CACCTACGATTGCCAGTCAG |
| stalk | | RPAAGGAVHTRGLDFASDKPTTTP | | CCTCTTTCACTGCGGCCTGA |
| extension | | APRPPTPAPTIASQPLSLRPEACRPA | | GGCCAGCAGACCAGCTGCC |
| regions | | AGGAVHTRGLDFACD | | GGCGGTGCCGTCCATACAA |
| | | | | GAGGACTGGACTTCGCGTC |
| | | | | CGATAAACCTACTACCACTC |
| | | | | CAGCCCCAAGGCCCCCAAC |
| | | | | CCCAGCACCGACTATCGCAT |
| | | | | CACAGCCTTTGTCACTGCGT |
| | | | | CCTGAAGCCAGCCGGCCAG |
| | | | | CTGCAGGGGGGGCCGTCCA |
| | | | | CACAAGGGGACTCGACTTT |
| | | | | GCGAGTGATAAGCCCACCA |
| | | | | CCACCCCTGCCCCTAGACCT |
| | | | | CCAACCCCAGCCCCTACAAT |
| | | | | CGCCAGCCAGCCCCTGAGC |
| | | | | CTGAGGCCCGAAGCCTGTA |
| | | | | GACCTGCCGCTGGCGGAGC |
| | | | | CGTGCACACCAGAGGCCTG |
| | | | | GATTTCGCCTGCGAC |

[0824] Exemplary Transmembrane Domain Sequences

| | | | | |
|---|---|---|---|---|
| CD8a | 475 | IYIWAPLAGTCGVLLLSLVITLYCNH | 476 | ATCTACATCTGGGCCCCTCT |
| Trans- | | RN | | GGCCGGCACCTGTGGCGTG |
| membrane | | | | CTGCTGCTGAGCCTGGTCAT |
| Domain | | | | CACCCTGTACTGCAACCACC |
| | | | | GGAAT |
| | 477 | FWVLVVVGGVLACYSLLVTVAFIIF | 478 | TTTTGGGTGCTGGTGGTGG |
| CD28 | | WVRSKRS | | TTGGTGGAGTCCTGGCTTG |
| Trans- | | | | CTATAGCTTGCTAGTAACAG |
| membrane | | | | TGGCCTTTATTATTTTCTGG |
| Domain | | | | GTGAGGAGTAAGAGGAGC |

[0825] Exemplary Intracellular Signaling Domain Sequences

| | | | | |
|---|---|---|---|---|
| CD3ζ signaling | 479 | RVKFSRSADAPAYQQGQNQLYNEL | 480 | CGGGTGAAGTTCAGCCGGA |
| domain | | NLGRREEYDVLDKRRGRDPEMGG | | GCGCCGACGCCCCTGCCTA |
| | | KPRRKNPQEGLYNELQKDKMAEA | | CCAGCAGGGCCAGAACCAG |
| | | YSEIGMKGERRRGKGHDGLYQGLS | | CTGTACAACGAGCTGAACC |
| | | TATKDTYDALHMQALPPR | | TGGGCCGGAGGGAGGAGT |
| | | | | ACGACGTGCTGGACAAGCG |
| | | | | GAGAGGCCGGGACCCTGA |
| | | | | GATGGGCGGCAAGCCCCG |
| | | | | GAGAAAGAACCCTCAGGAG |
| | | | | GGCCTGTATAACGAACTGC |
| | | | | AGAAAGACAAGATGGCCGA |
| | | | | GGCCTACAGCGAGATCGGC |
| | | | | ATGAAGGGCGAGCGGCGG |
| | | | | AGGGGCAAGGGCCACGAC |
| | | | | GGCCTGTACCAGGGCCTGA |
| | | | | GCACCGCCACCAAGGATAC |
| | | | | CTACGACGCCCTGCACATGC |
| | | | | AGGCCCTGCCCCCCAGA |
| CD28 co- | 481 | RSKRSRGGHSDYMNMTPRRPGPT | 482 | AGGAGCAAGCGGAGCAGA |
| stimulatory | | RKHYOPYAPPRDFAAYRS | | GGCGGCCACAGCGACTACA |
| domain | | | | TGAACATGACCCCCCGGAG |
| | | | | GCCTGGCCCCACCCGGAAG |
| | | | | CACTACCAGCCCTACGCCCC |
| | | | | TCCCAGGGACTTCGCCGCCT |
| | | | | ACCGGAGC |
| 4-1BB co- | 483 | KRGRKKLLYIFKQPFMRPVQTTQEE | 484 | AAGAGAGGCCGGAAGAAA |
| stimulatory | | DGCSCRFPEEEEGGCEL | | CTGCTGTACATCTTCAAGCA |
| domain | | | | GCCCTTCATGCGGCCCGTG |
| | | | | CAGACCACCCAGGAAGAGG |
| | | | | ACGGCTGCAGCTGCCGGTT |
| | | | | CCCCGAGGAAGAGGAAGG |
| | | | | CGGCTGCGAACTG |
| DNAX- | 485 | LCARPRRSPAQEDGKVYINMPGRG | 486 | CTGTGCGCACGCCCACGCC |
| activation | | | | GCAGCCCCGCCCAAGAAGA |
| protein 10 | | | | TGGCAAAGTCTACATCAAC |
| (DAP10) co- | | | | ATGCCAGGCAGGGGC |
| stimulatory | | | | |
| domain | | | | |
| DNAX- | 487 | YFLGRLVPRGRGAAEAATRKQRITE | 488 | TACTTCCTGGGCCGGCTGG |
| activation | | TESPYQELQGQRSDVYSDLNTQRP | | TCCCTCGGGGGCGAGGGGC |
| protein 12 | | YYK | | TGCGGAGGCAGCGACCCG |
| (DAP12) co- | | | | GAAACAGCGTATCACTGAG |
| stimulatory | | | | ACCGAGTCGCCTTATCAGG |
| | | | | AGCTCCAGGGTCAGAGGTC |
| | | | | GGATGTCTACAGCGACCTC |
| | | | | AACACACAGAGGCCGTATT |
| | | | | ACAAA |

[0826] Exemplary Signal Peptide Sequences

| | | | | |
|---|---|---|---|---|
| GM-CSFRa signal | 489 | MLLLVTSLLLCELPHPAFLLIP | 490 | ATGCTGCTGCTGGTGACCA |
| peptide | | | | GCCTGCTGCTGTGTGAGCT |
| | | | | GCCCCACCCCGCCTTTCTGC |
| | | | | TGATCCCC |
| Ig Kappa signal | 491 | MRLPAQLLGLLMLWVPGSSG | 492 | ATGAGGCTCCCTGCTCAGCT |
| peptide | | | | CCTGGGGCTGCTAATGCTCT |
| | | | | GGGTCCCAGGATCCAGTGG |
| | | | | G |
| Immuno-globulin | 493 | MDWTWILFLVAAATRVHS | 494 | ATGGATTGGACCTGGATTCT |
| E signal peptide | | | | GTTTCTGGTGGCCGCTGCCA |
| | | | | CAAGAGTGCACAGC |
| CD8α signal | 495 | MALPVTALLLPLALLLHAARP | 496 | ATGGCGCTGCCCGTGACCG |
| peptide | | | | CCTTGCTCCTGCCGCTGGCC |
| | | | | TTGCTGCTCCACGCCGCCAG |
| | | | | GCCG |
| Mouse Ig VH | 497 | MGWSCIILFLVATATGVHS | 498 | ATGGGCTGGTCCTGCATCAT |
| region 3 signal | | | | CCTGTTTCTGGTGGCTACCG |
| peptide | | | | CCACCGGCGTGCACAGC |
| β2M signal | 499 | MSRSVALAVLALLSLSGLEA | 500 | ATGTCTCGCTCCGTGGCCTT |
| peptide | | | | AGCTGTGCTCGCGCTACTCT |
| Azurocidin signal | 501 | MTRLTVLALLAGLLASSRA | 502 | CTCTTTCTGGCCTGGAGGCT |
| peptide | | | | ATGACCCGGCTGACAGTCCT |
| | | | | GGCCCTGCTGGCTGGTCTG |
| Human Serum | 503 | MKWVTFISLLFLFSSAYS | 504 | CTGGCGTCCTCGAGGGCC |
| Albumin signal | | | | ATGAAGTGGGTAACCTTTAT |
| peptide | | | | TTCCCTTCTTTTTCTCTTTAG |
| | | | | CTCGGCTTATTCC |
| A2M receptor | 505 | MGKNKLLHPSLVLLLLVLLPTDA | 506 | ATGGGGAAGAACAAACTCC |
| associated | | | | TTCATCCAAGTCTGGTTCTT |
| protein signal | | | | CTCCTCTTGGTCCTCCTGCCC |
| peptide | | | | ACAGACGCC |
| IGHV3-23 signal | 507 | MEFGLSWLFLVAILKGVQC | 508 | ATGGAGTTTGGGCTGAGCT |
| peptide | | | | GGCTTTTTCTTGTGGCTATTT |
| | | | | TAAAAGGTGTCCAGTGT |
| IGKV1-D33 | 509 | MDMRVPAQLLGLLLLWLSGARC | 510 | ATGGACATGAGGGTCCCTG |
| (HuL1) signal | | | | CTCAGCTCCTGGGGCTCCTG |
| peptide | | | | CTGCTCTGGCTCTCAGGTGC |
| | | | | CAGATGT |
| IGHV3-33(L14F) | 511 | MEFGLSWVFLVALFRGVQC | 512 | ATGGAGTTTGGGCTGAGCT |
| (HuH7) signal | | | | GGGTTTTCCTCGTTGCTCTTT |
| peptide | | | | TTAGAGGTGTCCAGTGT |
| TVB2 (T21A) | 513 | MGTSLLCWMALCLLGADHADA | 514 | ATGGGCACCAGCCTCCTCTG |
| signal peptide | | | | CTGGATGGCCCTGTGTCTCC |
| | | | | TGGGGGCAGATCACGCAGA |
| | | | | TGCT |
| CD52 signal | 515 | MKRFLFLLLTISLLVMVQIQTGLS | 516 | ATGAAGCGCTTCCTCTTCCT |
| peptide | | | | CCTACTCACCATCAGCCTCC |
| | | | | TGGTTATGGTACAGATACAA |
| | | | | ACTGGACTCTCA |
| Low-affinity | 517 | MGAGATGRAMDGPRLLLLLLLGVS | 518 | ATGGGGGCAGGTGCCACCG |
| nerve growth | | LGGA | | GCCGCGCCATGGACGGGCC |
| factor receptor | | | | GCGCCTGCTGCTGTTGCTGC |
| (LNGFR, | | | | TTCTGGGGGTGTCCCTTGGA |
| TNFRSF16) signal | | | | GGTGCC |
| peptide | | | | |

[0827] Exemplary Cytokine Sequences

| | | | | |
|---|---|---|---|---|
| IL-15 | 519 | NWVNVISDLKKIEDLIQSMHIDATL | 520 | AACTGGGTGAATGTGATCA |
| | | YTESDVHPSCKVTAMKCFLLELQVI | | GCGACCTGAAGAAGATCGA |
| | | SLESGDASIHDTVENLIILANNSLSS | | GGATCTGATCCAGAGCATG |
| | | NGNVTESGCKECEELEEKNIKEFLQ | | CACATTGATGCCACCCTGTA |
| | | SFVHIVQMFINTS | | CACAGAATCTGATGTGCAC |
| | | | | CCTAGCTGTAAAGTGACCG |
| | | | | CCATGAAGTGTTTTCTGCTG |
| | | | | GAGCTGCAGGTGATTTCTCT |
| | | | | GGAAAGCGGAGATGCCTCT |
| | | | | ATCCACGACACAGTGGAGA |
| | | | | ATCTGATCATCCTGGCCAAC |
| | | | | AATAGCCTGAGCAGCAATG |
| | | | | GCAATGTGACAGAGTCTGG |
| | | | | CTGTAAGGAGTGTGAGGAG |
| | | | | CTGGAGGAGAAGAACATCA |
| | | | | AGGAGTTTCTGCAGAGCTT |
| | | | | TGTGCACATCGTGCAGATG |
| | | | | TTCATCAATACAAGC |
| IL-15Rα | 521 | ITCPPPMSVEHADIWVKSYSLYSRE | 522 | ATTACATGCCCTCCTCCAAT |
| | | RYICNSGFKRKAGTSSLTECVLNKA | | GTCTGTGGAGCACGCCGAT |
| | | TNVAHWTTPSLKCIRDPALVHQRP | | ATTTGGGTGAAGTCCTACA |
| | | APPSTVTTAGVTPQPESLSPSGKEP | | GCCTGTACAGCAGAGAGAG |
| | | AASSPSSNNTAATTAAIVPGSQLM | | ATACATCTGCAACAGCGGC |
| | | PSKSPSTGTTEISSHESSHGTPSQTT | | TTTAAGAGAAAGGCCGGCA |
| | | AKNWELTASASHQPPGVYPQGHS | | CCTCTTCTCTGACAGAGTGC |
| | | DTTVAISTSTVLLCGLSAVSLLACYLK | | GTGCTGAATAAGGCCACAA |
| | | SRQTPPLASVEMEAMEALPVTWG | | ATGTGGCCCACTGGACAAC |
| | | TSSRDEDLENCSHHL | | ACCTAGCCTGAAGTGCATTA |
| | | | | GAGATCCTGCCCTGGTCCA |
| | | | | CCAGAGGCCTGCCCCTCCAT |
| | | | | CTACAGTGACAACAGCCGG |
| | | | | AGTGACACCTCAGCCTGAA |
| | | | | TCTCTGAGCCCTTCTGGAAA |
| | | | | AGAACCTGCCGCCAGCTCTC |
| | | | | CTAGCTCTAATAATACCGCC |
| | | | | GCCACAACAGCCGCCATTG |
| | | | | TGCCTGGATCTCAGCTGAT |
| | | | | GCCTAGCAAGTCTCCTAGCA |
| | | | | CAGGCACAACAGAGATCAG |
| | | | | CAGCCACGAATCTTCTCACG |
| | | | | GAACACCTTCTCAGACCACC |
| | | | | GCCAAGAATTGGGAGCTGA |
| | | | | CAGCCTCTGCCTCTCACCAG |
| | | | | CCTCCAGGAGTGTATCCTCA |
| | | | | GGGCCACTCTGATACAACA |
| | | | | GTGGCCATCAGCACATCTAC |
| | | | | AGTGCTGCTGTGTGGACTG |
| | | | | TCTGCCGTGTCTCTGCTGGC |
| | | | | CTGTTACCTGAAGTCTAGAC |
| | | | | AGACACCTCCTCTGGCCTCT |
| | | | | GTGGAGATGGAGGCCATG |
| | | | | GAAGCCCTGCCTGTGACAT |
| | | | | GGGGAACAAGCAGCAGAG |
| | | | | ATGAGGACCTGGAGAATTG |
| | | | | TTCTCACCACCTG |
| mbIL15 | 523 | NWVNVISDLKKIEDLIQSMHIDATL | 524 | AACTGGGTGAATGTGATCA |
| | | YTESDVHPSCKVTAMKCFLLELQVI | | GCGACCTGAAGAAGATCGA |
| | | SLESGDASIHDTVENLIILANNSLSS | | GGATCTGATCCAGAGCATG |
| | | NGNVTESGCKECEELEEKNIKEFLQ | | CACATTGATGCCACCCTGTA |
| | | SFVHIVQMFINTSSGGGSGGGGSG | | CACAGAATCTGATGTGCAC |
| | | GGGSGGGGSGGGSLQITCPPPMS | | CCTAGCTGTAAAGTGACCG |
| | | VEHADIWVKSYSLYSRERYICNSGF | | CCATGAAGTGTTTTCTGCTG |
| | | KRKAGTSSLTECVLNKATNVAHWT | | GAGCTGCAGGTGATTTCTCT |
| | | TPSLKCIRDPALVHQRPAPPSTVTT | | GGAAAGCGGAGATGCCTCT |
| | | AGVTPQPESLSPSGKEPAASSPSSN | | ATCCACGACACAGTGGAGA |
| | | NTAATTAAIVPGSQLMPSKSPSTGT | | ATCTGATCATCCTGGCCAAC |
| | | TEISSHESSHGTPSQTTAKNWELTA | | AATAGCCTGAGCAGCAATG |
| | | SASHQPPGVYPQGHSDTTVAISTST | | GCAATGTGACAGAGTCTGG |
| | | VLLCGLSAVSLLACYLKSRQTPPLAS | | CTGTAAGGAGTGTGAGGAG |
| | | VEMEAMEALPVTWGTSSRDEDLE | | CTGGAGGAGAAGAACATCA |
| | | NCSHHL | | AGGAGTTTCTGCAGAGCTT |
| | | | | TGTGCACATCGTGCAGATG |
| | | | | TTCATCAATACAAGCTCTGG |
| | | | | CGGAGGATCTGGAGGAGG |
| | | | | CGGATCTGGAGGAGGAGG |
| | | | | CAGTGGAGGCGGAGGATCT |
| | | | | GGCGGAGGATCTCTGCAGA |
| | | | | TTACATGCCCTCCTCCAATG |
| | | | | TCTGTGGAGCACGCCGATA |
| | | | | TTTGGGTGAAGTCCTACAG |
| | | | | CCTGTACAGCAGAGAGAGA |
| | | | | TACATCTGCAACAGCGGCTT |
| | | | | TAAGAGAAAGGCCGGCACC |
| | | | | TCTTCTCTGACAGAGTGCGT |
| | | | | GCTGAATAAGGCCACAAAT |
| | | | | GTGGCCCACTGGACAACAC |
| | | | | CTAGCCTGAAGTGCATTAG |
| | | | | AGATCCTGCCCTGGTCCACC |
| | | | | AGAGGCCTGCCCCTCCATCT |
| | | | | ACAGTGACAACAGCCGGAG |
| | | | | TGACACCTCAGCCTGAATCT |
| | | | | CTGAGCCCTTCTGGAAAAG |
| | | | | AACCTGCCGCCAGCTCTCCT |
| | | | | AGCTCTAATAATACCGCCGC |
| | | | | CACAACAGCCGCCATTGTG |
| | | | | CCTGGATCTCAGCTGATGCC |
| | | | | TAGCAAGTCTCCTAGCACA |
| | | | | GGCACAACAGAGATCAGCA |
| | | | | GCCACGAATCTTCTCACGGA |
| | | | | ACACCTTCTCAGACCACCGC |
| | | | | CAAGAATTGGGAGCTGACA |
| | | | | GCCTCTGCCTCTCACCAGCC |
| | | | | TCCAGGAGTGTATCCTCAG |
| | | | | GGCCACTCTGATACAACAG |
| | | | | TGGCCATCAGCACATCTACA |
| | | | | GTGCTGCTGTGTGGACTGT |
| | | | | CTGCCGTGTCTCTGCTGGCC |
| | | | | TGTTACCTGAAGTCTAGACA |
| | | | | GACACCTCCTCTGGCCTCTG |
| | | | | TGGAGATGGAGGCCATGGA |
| | | | | AGCCCTGCCTGTGACATGG |
| | | | | GGAACAAGCAGCAGAGAT |
| | | | | GAGGACCTGGAGAATTGTT |
| | | | | CTCACCACCTG |
| mbIL15 + IgE | 525 | MDWTWILFLVAAATRVHSNWVN | 526 | ATGGATTGGACCTGGATTC |
| signal Peptide | | VISDLKKIEDLIQSMHIDATLYTESD | | TGTTTCTGGTGGCCGCTGCC |
| | | VHPSCKVTAMKCFLLELQVISLESG | | ACAAGAGTGCACAGCAACT |
| | | DASIHDTVENLIILANNSLSSNGNVT | | GGGTGAATGTGATCAGCGA |
| | | ESGCKECEELEEKNIKEFLQSFVHIV | | CCTGAAGAAGATCGAGGAT |
| | | QMFINTSSGGGSGGGGSGGGGSG | | CTGATCCAGAGCATGCACA |
| | | GGGSGGGSLQITCPPPMSVEHADI | | TTGATGCCACCCTGTACACA |
| | | WVKSYSLYSRERYICNSGFKRKAGT | | GAATCTGATGTGCACCCTA |
| | | SSLTECVLNKATNVAHWTTPSLKCI | | GCTGTAAAGTGACCGCCAT |
| | | RDPALVHORPAPPSTVTTAGVTPQ | | GAAGTGTTTTCTGCTGGAG |
| | | PESLSPSGKEPAASSPSSNNTAATT | | CTGCAGGTGATTTCTCTGGA |
| | | AAIVPGSQLMPSKSPSTGTTEISSHE | | AAGCGGAGATGCCTCTATC |
| | | SSHGTPSQTTAKNWELTASASHQP | | CACGACACAGTGGAGAATC |
| | | PGVYPQGHSDTTVAISTSTVLLCGL | | TGATCATCCTGGCCAACAAT |
| | | SAVSLLACYLKSRQTPPLASVEMEA | | AGCCTGAGCAGCAATGGCA |
| | | MEALPVTWGTSSRDEDLENCSHHL | | ATGTGACAGAGTCTGGCTG |
| | | | | TAAGGAGTGTGAGGAGCTG |
| | | | | GAGGAGAAGAACATCAAG |
| | | | | GAGTTTCTGCAGAGCTTTGT |
| | | | | GCACATCGTGCAGATGTTC |
| | | | | ATCAATACAAGCTCTGGCG |
| | | | | GAGGATCTGGAGGAGGCG |
| | | | | GATCTGGAGGAGGAGGCA |
| | | | | GTGGAGGCGGAGGATCTG |
| | | | | GCGGAGGATCTCTGCAGAT |
| | | | | TACATGCCCTCCTCCAATGT |
| | | | | CTGTGGAGCACGCCGATAT |
| | | | | TTGGGTGAAGTCCTACAGC |
| | | | | CTGTACAGCAGAGAGAGAT |
| | | | | ACATCTGCAACAGCGGCTTT |
| | | | | AAGAGAAAGGCCGGCACCT |
| | | | | CTTCTCTGACAGAGTGCGT |
| | | | | GCTGAATAAGGCCACAAAT |
| | | | | GTGGCCCACTGGACAACAC |
| | | | | CTAGCCTGAAGTGCATTAG |
| | | | | AGATCCTGCCCTGGTCCACC |
| | | | | AGAGGCCTGCCCCTCCATCT |
| | | | | ACAGTGACAACAGCCGGAG |
| | | | | TGACACCTCAGCCTGAATCT |
| | | | | CTGAGCCCTTCTGGAAAAG |
| | | | | AACCTGCCGCCAGCTCTCCT |
| | | | | AGCTCTAATAATACCGCCGC |
| | | | | CACAACAGCCGCCATTGTG |
| | | | | CCTGGATCTCAGCTGATGCC |
| | | | | TAGCAAGTCTCCTAGCACA |
| | | | | GGCACAACAGAGATCAGCA |
| | | | | GCCACGAATCTTCTCACGGA |
| | | | | ACACCTTCTCAGACCACCGC |
| | | | | CAAGAATTGGGAGCTGACA |
| | | | | GCCTCTGCCTCTCACCAGCC |
| | | | | TCCAGGAGTGTATCCTCAG |
| | | | | GGCCACTCTGATACAACAG |
| | | | | TGGCCATCAGCACATCTACA |
| | | | | GTGCTGCTGTGTGGACTGT |
| | | | | CTGCCGTGTCTCTGCTGGCC |
| | | | | TGTTACCTGAAGTCTAGACA |
| | | | | GACACCTCCTCTGGCCTCTG |
| | | | | TGGAGATGGAGGCCATGGA |
| | | | | AGCCCTGCCTGTGACATGG |
| | | | | GGAACAAGCAGCAGAGAT |
| | | | | GAGGACCTGGAGAATTGTT |
| | | | | CTCACCACCTG |

[0828] Exemplary Linker Sequences

| | SEQ | | SEQ ID | |
|---|---|---|---|---|
| Linker Name | ID NO | Amino Acids Sequence | NO | Polynucleotide Sequence |
| Whitlow Linker | 527 | GSTSGSGKPGSGEGSTKG | 528 | GGCAGCACCTCCGGCAGCGG |
| | | | | CAAGCCTGGCAGCGGCGAGG |
| | | | | GCAGCACCAAGGGC |
| Linker | 529 | SGGGSGGGGSGGGGSGGGGSGG | 530 | TCTGGCGGAGGATCTGGAGG |
| | | GSLQ | | AGGCGGATCTGGAGGAGGAG |
| | | | | GCAGTGGAGGCGGAGGATCT |
| | | | | GGCGGAGGATCTCTGCAG |
| GSG linker | 531 | GSG | 532 | GGAAGCGGA |
| SGSG linker | 533 | SGSG | 534 | AGTGGCAGCGGC |
| (G4S)3 linker | 535 | GGGGSGGGGSGGGGS | 536 | GGTGGCGGTGGCTCGGGCGG |
| | | | | TGGTGGGTCGGGTGGCGGCG |
| | | | | GATCT |
| Furin cleavage | 537 | RAKR | 538 | CGTGCAAAGCGT |
| site/Furinlink1 | | | | |
| Fmdv | 539 | RAKRAPVKQTLNFDLLKLAGDVESN | 540 | AGAGCCAAGAGGGCACCGGT |
| | | PGP | | GAAACAGACTTTGAATTTTGA |
| | | | | CCTTCTGAAGTTGGCAGGAGA |
| | | | | CGTTGAGTCCAACCCTGGGCC |
| | | | | C |
| Thosea asigna | 541 | EGRGSLLTCGDVEENPGP | 542 | GAGGGCAGAGGAAGTCTGCT |
| virus 2A region | | | | AACATGCGGTGACGTCGAGG |
| (T2A) | | | | AGAATCCTGGACCT |
| Furin-GSG-T2A | 543 | RAKRGSGEGRGSLLTCGDVEENPG | 544 | AGAGCTAAGAGGGGAAGCGG |
| | | P | | AGAGGGCAGAGGAAGTCTGC |
| | | | | TAACATGCGGTGACGTCGAGG |
| | | | | AGAATCCTGGACCT |
| Furin-SGSG-T2A | 545 | RAKRSGSGEGRGSLLTCGDVEENP | 546 | AGGGCCAAGAGGAGTGGCAG |
| | | GP | | CGGCGAGGGCAGAGGAAGTC |
| | | | | TTCTAACATGCGGTGACGTGG |
| | | | | AGGAGAATCCCGGCCCT |
| Porcine | 547 | ATNFSLLKQAGDVEENPGP | 548 | GCAACGAACTTCTCTCTCCTAA |
| teschovirus-1 2A | | | | AACAGGCTGGTGATGTGGAG |
| region (P2A) | | | | GAGAATCCTGGTCCA |
| GSG-P2A | 549 | GSGATNFSLLKQAGDVEENPGP | 550 | GGAAGCGGAGCTACTAACTTC |
| | | | | AGCCTGCTGAAGCAGGCTGG |
| | | | | AGACGTGGAGGAGAACCCTG |
| | | | | GACCT |
| Equine rhinitis A | 551 | QCTNYALLKLAGDVESNPGP | 552 | CAGTGTACTAATTATGCTCTCT |
| virus 2A region | | | | TGAAATTGGCTGGAGATGTTG |
| (E2A) | | | | AGAGCAACCCTGGACCT |
| Foot-and-mouth | 553 | VKQTLNFDLLKLAGDVESNPGP | 554 | GTCAAACAGACCCTAAACTTT |
| disease virus 2A | | | | GATCTGCTAAAACTGGCCGGG |
| region (F2A) | | | | GATGTGGAAAGTAATCCCGGC |
| | | | | CCC |
| FP2A | 555 | RAKRAPVKQGSGATNFSLLKQAGD | 556 | CGTGCAAAGCGTGCACCGGTG |
| | | VEENPGP | | AAACAGGGAAGCGGAGCTAC |
| | | | | TAACTTCAGCCTGCTGAAGCA |
| | | | | GGCTGGAGACGTGGAGGAGA |
| | | | | ACCCTGGACCT |
| Linker-GSG | 557 | APVKQGSG | 558 | GCACCGGTGAAACAGGGAAG |
| | | | | CGGA |
| Linker | 559 | GGGGSGGGSGGGGSGGGGS | 560 | GGTGGCGGTGGCTCGGGCGG |
| | | | | TGGTGGGTCGGGTGGCGGCG |
| | | | | GATCTGGTGGCGGTGGCTCG |
| Linker | 561 | APVKQ | 562 | GCACCGGTGAAACAG |
| Linker | 563 | A(EAAAK)nA (n = 2-5) | 564 | |

[0829] Exemplary Cell Tag Sequences

| | SEQ ID | | SEQ | |
|---|---|---|---|---|
| | NO | Amino Acid Sequence | ID NO | Polynucleotide Sequence |
| HER1 Domain | 565 | RKVCNGIGIGEFKDSLSINATNIKHF | 566 | CGCAAAGTGTGTAACGGAA |
| III | | KNCTSISGDLHILPVAFRGDSFTHTP | | TAGGTATTGGTGAATTTAA |
| | | PLDPQELD | | AGACTCACTCTCCATAAATG |
| | | ILKTVKEITGFLLIQAWPENRTDLHA | | CTACGAATATTAAACACTTC |
| | | FENLEIIRGRTKQHGQFSLAVVSLNI | | AAAAACTGCACCTCCATCAG |
| | | TSLGLRSL | | TGGCGATCTCCACATCCTGC |
| | | KEISDGDVIISGNKNLCYANTINWK | | CGGTGGCATTTAGGGGTGA |
| | | KLFGTSGQKTKIISNRGENSCKATG | | CTCCTTCACACATACTCCTC |
| | | Q | | CTCTGGATCCACAGGAACT |
| | | | | GGATATTCTGAAAACCGTA |
| | | | | AAGGAAATCACAGGGTTTT |
| | | | | TGCTGATTCAGGCTTGGCCT |
| | | | | GAAAACAGGACGGACCTCC |
| | | | | ATGCCTTTGAGAACCTAGA |
| | | | | AATCATACGCGGCAGGACC |
| | | | | AAGCAACATGGTCAGTTTTC |
| | | | | TCTTGCAGTCGTCAGCCTGA |
| | | | | ACATAACATCCTTGGGATTA |
| | | | | CGCTCCCTCAAGGAGATAA |
| | | | | GTGATGGAGATGTGATAAT |
| | | | | TTCAGGAAACAAAAATTTGT |
| | | | | GCTATGCAAATACAATAAA |
| | | | | CTGGAAAAAACTGTTTGGG |
| | | | | ACCTCCGGTCAGAAAACCA |
| | | | | AAATTATAAGCAACAGAGG |
| | | | | TGAAAACAGCTGCAAGGCC |
| | | | | ACAGGCCAG |
| HER1 | 567 | VCHALCSPEGCWGPEPRDCVS | 568 | GTCTGCCATGCCTTGTGCTC |
| truncated | | | | CCCCGAGGGCTGCTGGGGC |
| Domain IV | | | | CCGGAGCCCAGGGACTGCG |
| | | | | TCTCT |
| HER1t | 569 | RKVCNGIGIGEFKDSLSINATNIKHF | 570 | CGCAAAGTGTGTAACGGAA |
| | | KNCTSISGDLHILPVAFRGDSFTHTP | | TAGGTATTGGTGAATTTAA |
| | | PLDPQELDILKTVKEITGFLLIQAWP | | AGACTCACTCTCCATAAATG |
| | | ENRTDLHAFENLEIIRGRTKQHGQF | | CTACGAATATTAAACACTTC |
| | | SLAVVSLNITSLGLRSLKEISDGDVIIS | | AAAAACTGCACCTCCATCAG |
| | | GNKNLCYANTINWKKLFGTSGQKT | | TGGCGATCTCCACATCCTGC |
| | | KIISNRGENSCKATGQVCHALCSPE | | CGGTGGCATTTAGGGGTGA |
| | | GCWGPEPRDCVSCRNVSRGRECV | | CTCCTTCACACATACTCCTC |
| | | DKCNLLEGEPREFVENSECIQCHPE | | CTCTGGATCCACAGGAACT |
| | | CLPQAMNITCTGRGPDNCIQCAHY | | GGATATTCTGAAAACCGTA |
| | | IDGPHCVKTCPAGVMGENNTLVW | | AAGGAAATCACAGGGTTTT |
| | | KYADAGHVCHLCHPNCTYGCTGP | | TGCTGATTCAGGCTTGGCCT |
| | | GLEGCPTNGPKIPSIATGMVGALLL | | GAAAACAGGACGGACCTCC |
| | | LLVVALGIGLFM | | ATGCCTTTGAGAACCTAGA |
| | | | | AATCATACGCGGCAGGACC |
| | | | | AAGCAACATGGTCAGTTTTC |
| | | | | TCTTGCAGTCGTCAGCCTGA |
| | | | | ACATAACATCCTTGGGATTA |
| | | | | CGCTCCCTCAAGGAGATAA |
| | | | | GTGATGGAGATGTGATAAT |
| | | | | TTCAGGAAACAAAAATTTGT |
| | | | | GCTATGCAAATACAATAAA |
| | | | | CTGGAAAAAACTGTTTGGG |
| | | | | ACCTCCGGTCAGAAAACCA |
| | | | | AAATTATAAGCAACAGAGG |
| | | | | TGAAAACAGCTGCAAGGCC |
| | | | | ACAGGCCAGGTCTGCCATG |
| | | | | CCTTGTGCTCCCCCGAGGG |
| | | | | CTGCTGGGGCCCGGAGCCC |
| | | | | AGGGACTGCGTCTCTTGCC |
| | | | | GGAATGTCAGCCGAGGCAG |
| | | | | GGAATGCGTGGACAAGTGC |
| | | | | AACCTTCTGGAGGGTGAGC |
| | | | | CAAGGGAGTTTGTGGAGAA |
| | | | | CTCTGAGTGCATACAGTGC |
| | | | | CACCCAGAGTGCCTGCCTCA |
| | | | | GGCCATGAACATCACCTGC |
| | | | | ACAGGACGGGGACCAGAC |
| | | | | AACTGTATCCAGTGTGCCCA |
| | | | | CTACATTGACGGCCCCCACT |
| | | | | GCGTCAAGACCTGCCCGGC |
| | | | | AGGAGTCATGGGAGAAAAC |
| | | | | AACACCCTGGTCTGGAAGT |
| | | | | ACGCAGACGCCGGCCATGT |
| | | | | GTGCCACCTGTGCCATCCAA |
| | | | | ACTGCACCTACGGATGCACT |
| | | | | GGGCCAGGTCTTGAAGGCT |
| | | | | GTCCAACGAATGGGCCTAA |
| | | | | GATCCCGTCCATCGCCACTG |
| | | | | GGATGGTGGGGGCCCTCCT |
| | | | | CTTGCTGCTGGTGGTGGCC |
| | | | | CTGGGGATCGGCCTCTTCAT |
| | | | | G |
| HER1t-1 | 571 | RKVCNGIGIGEFKDSLSINATNIKHF | 572 | CGCAAAGTGTGTAACGGAA |
| | | KNCTSISGDLHILPVAFRGDSFTHTP | | TAGGTATTGGTGAATTTAA |
| | | PLDPQELDILKTVKEITGFLLIQAWP | | AGACTCACTCTCCATAAATG |
| | | ENRTDLHAFENLEIIRGRTKQHGQF | | CTACGAATATTAAACACTTC |
| | | SLAVVSLNITSLGLRSLKEISDGDVIIS | | AAAAACTGCACCTCCATCAG |
| | | GNKNLCYANTINWKKLFGTSGQKT | | TGGCGATCTCCACATCCTGC |
| | | KIISNRGENSCKATGQVCHALCSPE | | CGGTGGCATTTAGGGGTGA |
| | | GCWGPEPRDCVSGGGGSGGGSG | | CTCCTTCACACATACTCCTC |
| | | GGGSGGGGSFWVLVVVGGVLACY | | CTCTGGATCCACAGGAACT |
| | | SLLVTVAFIIFWVRSKRS | | GGATATTCTGAAAACCGTA |
| | | | | AAGGAAATCACAGGGTTTT |
| | | | | TGCTGATTCAGGCTTGGCCT |
| | | | | GAAAACAGGACGGACCTCC |
| | | | | ATGCCTTTGAGAACCTAGA |
| | | | | AATCATACGCGGCAGGACC |
| | | | | AAGCAACATGGTCAGTTTTC |
| | | | | TCTTGCAGTCGTCAGCCTGA |
| | | | | ACATAACATCCTTGGGATTA |
| | | | | CGCTCCCTCAAGGAGATAA |
| | | | | GTGATGGAGATGTGATAAT |
| | | | | TTCAGGAAACAAAAATTTGT |
| | | | | GCTATGCAAATACAATAAA |
| | | | | CTGGAAAAAACTGTTTGGG |
| | | | | ACCTCCGGTCAGAAAACCA |
| | | | | AAATTATAAGCAACAGAGG |
| | | | | TGAAAACAGCTGCAAGGCC |
| | | | | ACAGGCCAGGTCTGCCATG |
| | | | | CCTTGTGCTCCCCCGAGGG |
| | | | | CTGCTGGGGCCCGGAGCCC |
| | | | | AGGGACTGCGTCTCTGGTG |
| | | | | GCGGTGGCTCGGGCGGTG |
| | | | | GTGGGTCGGGTGGCGGCG |
| | | | | GATCTGGTGGCGGTGGCTC |
| | | | | GTTTTGGGTGCTGGTGGTG |
| | | | | GTTGGTGGAGTCCTGGCTT |
| | | | | GCTATAGCTTGCTAGTAACA |
| | | | | GTGGCCTTTATTATTTTCTG |
| | | | | GGTGAGGAGTAAGAGGAG |
| | | | | CTAA |
| FL CD20 | 573 | MTTPRNSVNGTFPAEPMKGPIAM | 574 | ATGACAACACCCAGAAATT |
| | | QSGPKPLFRRMSSLVGPTQSFFMR | | CAGTAAATGGGACTTTCCC |
| | | ESKTLGAVQIMNGLFHIALGGLLMI | | GGCAGAGCCAATGAAAGGC |
| | | PAGIYAPICVTVWYPLWGGIMYIIS | | CCTATTGCTATGCAATCTGG |
| | | GSLLAATEKNSRKCLVKGKMIMNS | | TCCAAAACCACTCTTCAGGA |
| | | LSLFAAISGMILSIMDILNIKISHFLK | | GGATGTCTTCACTGGTGGG |
| | | MESLNFIRAHTPYINIYNCEPANPSE | | CCCCACGCAAAGCTTCTTCA |
| | | KNSPSTQYCYSIQSLFLGILSVMLIFA | | TGAGGGAATCTAAGACTTT |
| | | FFQELVIAGIVENEWKRTCSRPKSNI | | GGGGGCTGTCCAGATTATG |
| | | VLLSAEEKKEQTIEIKEEVVGLTETSS | | AATGGGCTCTTCCACATTGC |
| | | QPKNEEDIEIIPIQEEEEEETETNFPE | | CCTGGGGGGTCTTCTGATG |
| | | PPQDQESSPIENDSSP | | ATCCCAGCAGGGATCTATG |
| | | | | CACCCATCTGTGTGACTGTG |
| | | | | TGGTACCCTCTCTGGGGAG |
| | | | | GCATTATGTATATTATTTCC |
| | | | | GGATCACTCCTGGCAGCAA |
| | | | | CGGAGAAAAACTCCAGGAA |
| | | | | GTGTTTGGTCAAAGGAAAA |
| | | | | ATGATAATGAATTCATTGAG |
| | | | | CCTCTTTGCTGCCATTTCTG |
| | | | | GAATGATTCTTTCAATCATG |
| | | | | GACATACTTAATATTAAAAT |
| | | | | TTCCCATTTTTTAAAAATGG |
| | | | | AGAGTCTGAATTTTATTAGA |
| | | | | GCTCACACACCATATATTAA |
| | | | | CATATACAACTGTGAACCA |
| | | | | GCTAATCCCTCTGAGAAAA |
| | | | | ACTCCCCATCTACCCAATAC |
| | | | | TGTTACAGCATACAATCTCT |
| | | | | GTTCTTGGGCATTTTGTCAG |
| | | | | TGATGCTGATCTTTGCCTTC |
| | | | | TTCCAGGAACTTGTAATAGC |
| | | | | TGGCATCGTTGAGAATGAA |
| | | | | TGGAAAAGAACGTGCTCCA |
| | | | | GACCCAAATCTAACATAGTT |
| | | | | CTCCTGTCAGCAGAAGAAA |
| | | | | AAAAAGAACAGACTATTGA |
| | | | | AATAAAAGAAGAAGTGGTT |
| | | | | GGGCTAACTGAAACATCTTC |
| | | | | CCAACCAAAGAATGAAGAA |
| | | | | GACATTGAAATTATTCCAAT |
| | | | | CCAAGAAGAGGAAGAAGA |
| | | | | AGAAACAGAGACGAACTTT |
| | | | | CCAGAACCTCCCCAAGATCA |
| | | | | GGAATCCTCACCAATAGAA |
| | | | | AATGACAGCTCTCCT |
| CD20t-1 | 575 | MTTPRNSVNGTFPAEPMKGPIAM | 576 | ATGACCACACCACGGAACT |
| | | QSGPKPLFRRMSSLVGPTQSFFMR | | CTGTGAATGGCACCTTCCCA |
| | | ESKTLGAVQIMNGLFHIALGGLLMI | | GCAGAGCCAATGAAGGGAC |
| | | PAGIYAPICVTVWYPLWGGIMYIIS | | CAATCGCAATGCAGAGCGG |
| | | GSLLAATEKNSRKCLVKGKMIMNS | | ACCCAAGCCTCTGTTTCGGA |
| | | LSLFAAISGMILSIMDILNIKISHFLK | | GAATGAGCTCCCTGGTGGG |
| | | MESLNFIRAHTPYINIYNCEPANPSE | | CCCAACCCAGTCCTTCTTTA |
| | | KNSPSTQYCYSIQSLFLGILSVMLIFA | | TGAGAGAGTCTAAGACACT |
| | | FFQELVIAGIVENEWKRTCSRPKSNI | | GGGCGCCGTGCAGATCATG |
| | | VLLSAEEKKEQTIEIKEEVVGLTETSS | | AACGGACTGTTCCACATCGC |
| | | QPKNEEDIE | | CCTGGGAGGACTGCTGATG |
| | | | | ATCCCAGCCGGCATCTACGC |
| | | | | CCCTATCTGCGTGACCGTGT |
| | | | | GGTACCCTCTGTGGGGCGG |
| | | | | CATCATGTATATCATCTCCG |
| | | | | GCTCTCTGCTGGCCGCCACA |
| | | | | GAGAAGAACAGCAGGAAG |
| | | | | TGTCTGGTGAAGGGCAAGA |
| | | | | TGATCATGAATAGCCTGTCC |
| | | | | CTGTTTGCCGCCATCTCTGG |
| | | | | CATGATCCTGAGCATCATG |
| | | | | GACATCCTGAACATCAAGA |
| | | | | TCAGCCACTTCCTGAAGATG |
| | | | | GAGAGCCTGAACTTCATCA |
| | | | | GAGCCCACACCCCTTACATC |
| | | | | AACATCTATAATTGCGAGCC |
| | | | | TGCCAACCCATCCGAGAAG |
| | | | | AATTCTCCAAGCACACAGTA |
| | | | | CTGTTATTCCATCCAGTCTC |
| | | | | TGTTCCTGGGCATCCTGTCT |
| | | | | GTGATGCTGATCTTTGCCTT |
| | | | | CTTTCAGGAGCTGGTCATC |
| | | | | GCCGGCATCGTGGAGAACG |
| | | | | AGTGGAAGAGGACCTGCAG |
| | | | | CCGCCCCAAGTCCAATATCG |
| | | | | TGCTGCTGTCCGCCGAGGA |
| | | | | GAAGAAGGAGCAGACAATC |
| | | | | GAGATCAAGGAGGAGGTG |
| | | | | GTGGGCCTGACCGAGACAT |
| | | | | CTAGCCAGCCTAAGAATGA |
| | | | | GGAGGATATCGAG |

[0830] Exemplary Vector Sequences

| | | |
|---|---|---|
| Human EF1A1 | 577 | GCCGCAATAAAATATCTTTA |
| Promoter | | TTTTCATTACATCTGTGTGTT |
| | | GGTTTTTTGTGTGAATCGTA |
| | | ACTAACATACGCTCTCCATC |
| | | AAAACAAAACGAAACAAAA |
| | | CAAACTAGCAAAATAGGCT |
| | | GTCCCCAGTGCAAGTGCAG |
| | | GTGCCAGAACATTTCTCTAT |
| | | CGAAGGATCTGCGATCGCT |
| | | CCGGTGCCCGTCAGTGGGC |
| | | AGAGCGCACATCGCCCACA |
| | | GTCCCCGAGAAGTTGGGGG |
| | | GAGGGGTCGGCAATTGAAC |
| | | CGGTGCCTAGAGAAGGTGG |
| | | CGCGGGGTAAACTGGGAAA |
| | | GTGATGTCGTGTACTGGCTC |
| | | CGCCTTTTTCCCGAGGGTGG |
| | | GGGAGAACCGTATATAAGT |
| | | GCAGTAGTCGCCGTGAACG |
| | | TTCTTTTTCGCAACGGGTTT |
| | | GCCGCCAGAACACAG |
| Human CMV | 578 | GTGATGCGGTTTTGGCAGT |
| immediate | | ACATCAATGGGCGTGGATA |
| Early | | GCGGTTTGACTCACGGGGA |
| Promoter | | TTTCCAAGTCTCCACCCCATT |
| | | GACGTCAATGGGAGTTTGT |
| | | TTTGGCACCAAAATCAACGG |
| | | GACTTTCCAAAATGTCGTAA |
| | | CAACTCCGCCCCATTGACGC |
| | | AAATGGGCGGTAGGCGTGT |
| | | ACGGTGGGAGGTCTATATA |
| | | AGCAGAGCTC |
| ColE1 ORI | 579 | TGTGAGCAAAAGGCCAGCA |
| | | AAAGGCCAGGAACCGTAAA |
| | | AAGGCCGCGTTGCTGGCGT |
| | | TTTTCCATAGGCTCCGCCCC |
| | | CCTGACGAGCATCACAAAA |
| | | ATCGACGCTCAAGTCAGAG |
| | | GTGGCGAAACCCGACAGGA |
| | | CTATAAAGATACCAGGCGTT |
| | | TCCCCCTGGAAGCTCCCTCG |
| | | TGCGCTCTCCTGTTCCGACC |
| | | CTGCCGCTTACCGGATACCT |
| | | GTCCGCCTTTCTCCCTTCGG |
| | | GAAGCGTGGCGCTTTCTCAT |
| | | AGCTCACGCTGTAGGTATCT |
| | | CAGTTCGGTGTAGGTCGTTC |
| | | GCTCCAAGCTGGGCTGTGT |
| | | GCACGAACCCCCCGTTCAGC |
| | | CCGACCGCTGCGCCTTATCC |
| | | GGTAACTATCGTCTTGAGTC |
| | | CAACCCGGTAAGACACGAC |
| | | TTATCGCCACTGGCAGCAGC |
| | | CACTGGTAACAGGATTAGC |
| | | AGAGCGAGGTATGTAGGCG |
| | | GTGCTACAGAGTTCTTGAA |
| | | GTGGTGGCCTAACTACGGC |
| | | TACACTAGAAGAACAGTATT |
| | | TGGTATCTGCGCTCTGCTGA |
| | | AGCCAGTTACCTTCGGAAAA |
| | | AGAGTTGGTAGCTCTTGATC |
| | | CGG CAAACAAACCACCG CT |
| | | GGTAGCGGTGGTTTTTTTGT |
| | | TTGCAAGCAGCAGATTACG |
| | | CGCAGAAAAAAAGGATCTC |
| | | AAGAAGATCCTTTGATCTTT |
| | | TCTACGGGG |
| Left | 580 | CTACAGTTGA |
| Transposon | | AGTCGGAAGT |
| Repeat | | TTACATACAC TTAAGTTGGA |
| Region | | GTCATTAAAA CTCGTTTTTC |
| | | AACTACTCCA CAAATTTCTT |
| | | GTTAACAAAC |
| | | AATAGTTTTG |
| | | GCAAGTCAGT |
| | | TAGGACATCT ACTTTGTGCA |
| | | TGACACAAGT CATTTTTCCA |
| | | ACAATTGTTT |
| | | ACAGACAGAT TATTTCACTT |
| | | ATAATTCACT GTATCACAAT |
| | | TCCAGTGGGT |
| | | CAGAAGTTTA |
| | | CATACACTAA |
| | | GTTGACTGTG CCTTTAAACA |
| | | GCTTGGAAAA |
| | | TTCCAGAAAA |
| | | TGATGTCATG GCTTTAG |
| Right | 581 | GTGGAAGGCT |
| Transposon | | ACTCGAAATG |
| Repeat | | TTTGACCCAA GTTAAACAAT |
| Region | | TTAAAGGCAA |
| | | TGCTACCAAA TACTAATTGA |
| | | GTGTATGTTA ACTTCTGACC |
| | | CACTGGGAAT |
| | | GTGATGAAAG |
| | | AAATAAAAGC |
| | | TGAAATGAAT CATTCTCTCT |
| | | ACTATTATTC TGATATTTCA |
| | | CATTCTTAAA |
| | | ATAAAGTGGT |
| | | GATCCTAACT |
| | | GACCTTAAGA |
| | | CAGGGAATCT |
| | | TTACTCGGAT |
| | | TAAATGTCAG |
| | | GAATTGTGAA |
| | | AAAGTGAGTT |
| | | TAAATGTATT |
| | | TGGCTAAGGT |
| | | GTATGTAAAC TTCCGACTTC |
| | | AACTGTAGG |

[0831] Exemplary control sequences

| miRNA | SEQ | miRNA | |
|---|---|---|---|
| Target | ID NO | backbone | DNA sequence of Pri-miRNA |
| Scrambled | 582 | miR206, | GATGCTACAAGTGGCCCACTTCTGAGATGCGGGCTGCTTCT |
| control 2 | | shorter | GGATGACACTGCTTCCCGAGGCATTTCGCCCTATCTGCAAGT |
| | | arms | ACTATGGATTACTTTGCTAGTGGTGTAGATAGGGTGAAATG |
| | | | TTTCGGCAAGTGCCTCCTCGCTGGCCCCAGGGTACCACCCGG |
| | | | AGCACAGGTTTGGTGACCTT |
| neg. ctl | 583 | miR150 | AGGGACTGGGCCCACGGGGAGGCAGCGTCCCCGAGGCAGC |
| c.elegans | | | AGCGGCAGCGGCGGCTCCTCTCCCCATGGCCCTGTCACAACC |
| cel-miR-67 | | | TCCTAGAAAGAGTACTGGGCTCAGACCCTCTTTCAGGCCGTT |
| | | | GTGACAGGGACCTGGGGACCCCGGCACCGGCAGGCCCCAA |
| | | | GGGGTGAGGTGAGCGGGCATTGGGACCTCCCCTCCCTGTAC |
| | | | TC |
| neg. ctl | 584 | miR204 | AGGAGGGTGGGGGTGGAGGCAAGCAGAGGACTTCCTGATC |
| c.elegans | | | GCGTACCCATGGCTACAGTCTTTCTTCATGTGACTCGTGGAC |
| cel-miR-67 | | | TTGTACTACACAAAAGTACTGTGAGAATATATGAAGGACAG |
| | | | GCTTTAGTGTAGTATGCGTTCAATTGTCATCACTGGCATCTTT |
| | | | TTTGATCATTGCACCATCATCAAATGCATTGGGATAACCATG |
| | | | AC |
| 210 bp | 585 | — | GGTAAGTCATGACTCCCTACAATGGACATGATCATAGTAGGT |
| stuffer | | | ACTATAAGGCACCTAGCTATACCCTCCTATAGAGAGTTTGAG |
| | | | TCTATTGTAGCAAGTCTTTCTTTTAGGGCCTAGGACTCTTCCC |
| | | | ACTCTCTTCCATCGCCTAAGCTCTAACTCTTCCTTGTAGTAGA |
| | | | AATAAGTCACTTCTAAGGCTGGGACCCTCCTAGACCCTAA |
| Scrambled | 586 | miR206 | TTAGGATGAGTTGAGATCCCAGTGATCTTCTCGCTAAGAGTT |
| control 1 | | | TCCTGCCTGGGCAAGGAGGAAAGATGCTACAAGTGGCCCAC |
| | | | TTCTGAGATGCGGGCTGCTTCTGGATGACACTGCTTCCCGAG |
| | | | GCATTTCGCCCTATCTGCAAGTACTATGGATTACTTTGCTAGT |
| | | | GGTGTAGATAGGGTGAAATGTTTCGGCAAGTGCCTCCTCGC |
| | | | TGGCCCCAGGGTACCACCCGGAGCACAGGTTTGGTGACCTT |
| | | | CTTCCTCATCAGGGCTTTGTGCCAGCAAATGACTCCCTCACC |
| | | | AAGGAAGCAAGAGCCTCTGAATCCCATCTGGGCTCTTCCTGA |
| | | | ACACCCCTATCTCCCCCTCT |

TABLE 14
Additional Sequences

| | | | | |
|---|---|---|---|---|
| | SEQ ID | | SEQ | |
| Name | NO | Amino Acid Sequence | ID NO | Nucleotide Sequence |

CAR Sequences

| | | | | |
|---|---|---|---|---|
| Human ROR1 | 587 | PLLALLAALLLAARGAAAQETELSVS | 588 | ATGCACCGGCCGCGCCGCC |
| | | AELVPTSSWNISSELNKDSYLTLDEP | | GCGGGACGCGCCCGCCGCT |
| | | MNNITTSLGQTAELHCKVSGNPPP | | CCTGGCGCTGCTGGCCGCG |
| | | TIRWFKNDAPVVQEPRRLSFRSTIY | | CTGCTGCTGGCCGCACGCG |
| | | GSRLRIRNLDTTDTGYFQCVATNG | | GGGCTGCTGCCCAAGAAAC |
| | | KEVVSSTGVLFVKFGPPPTASPGYS | | AGAGCTGTCAGTCAGTGCT |
| | | DEYEEDGFCQPYRGIACARFIGNRT | | GAATTAGTGCCTACCTCATC |
| | | VYMESLHMQGEIENQITAAFTMIG | | ATGGAACATCTCAAGTGAA |
| | | TSSHLSDKCSQFAIPSLCHYAFPYCD | | CTCAACAAAGATTCTTACCT |
| | | ETSSVPKPRDLCRDECEILENVLCQT | | GACCCTCGATGAACCAATG |
| | | EYIFARSNPMILMRLKLPNCEDLPQ | | AATAACATCACCACGTCTCT |
| | | PESPEAANCIRIGIPMADPINKNHK | | GGGCCAGACAGCAGAACTG |
| | | CYNSTGVDYRGTVSVTKSGRQCQP | | CACTGCAAAGTCTCTGGGA |
| | | WNSQYPHTHTFTALRFPELNGGHS | | ATCCACCTCCCACCATCCGC |
| | | YCRNPGNQKEAPWCFTLDENFKS | | TGGTTCAAAAATGATGCTCC |
| | | DLCDIPACDSKDSKEKNKMEILYILV | | TGTGGTCCAGGAGCCCCGG |
| | | PSVAIPLAIALLFFFICVCRNNQKSSS | | AGGCTCTCCTTTCGGTCCAC |
| | | APVQRQPKHVRGQNVEMSMLNA | | CATCTATGGCTCTCGGCTGC |
| | | YKPKSKAKELPLSAVRFMEELGECA | | GGATTAGAAACCTCGACAC |
| | | FGKIYKGHLYLPGMDHAQLVAIKTL | | CACAGACACAGGCTACTTCC |
| | | KDYNNPQQWTEFQQEASLMAEL | | AGTGCGTGGCAACAAACGG |
| | | HHPNIVCLLGAVTQEQPVCMLFEYI | | CAAGGAGGTGGTTTCTTCC |
| | | NQGDLHEFLIMRSPHSDVGCSSDE | | ACTGGAGTCTTGTTTGTCAA |
| | | DGTVKSSLDHGDFLHIAIQIAAGME | | GTTTGGCCCCCCTCCCACTG |
| | | YLSSHFFVHKDLAARNILIGEQLHVK | | CAAGTCCAGGATACTCAGA |
| | | ISDLGLSREIYSADYYRVQSKSLLPIR | | TGAGTATGAAGAAGATGGA |
| | | WMPPEAIMYGKFSSDSDIWSFGV | | TTCTGTCAGCCATACAGAG |
| | | VLWEIFSFGLQPYYGFSNQEVIEMV | | GGATTGCATGTGCAAGATT |
| | | RKRQLLPCSEDCPPRMYSLMTECW | | TATTGGCAACCGCACCGTCT |
| | | NEIPSRRPRFKDIHVRLRSWEGLSS | | ATATGGAGTCTTTGCACATG |
| | | HTSSTTPSGGNATTQTTSLSASPVS | | CAAGGGGAAATAGAAAATC |
| | | NLSNPRYPNYMFPSQGITPQGQIA | | AGATCACAGCTGCCTTCACT |
| | | GFIGPPIPQNQRFIPINGYPIPPGYA | | ATGATTGGCACTTCCAGTCA |
| | | AFPAAHYQPTGPPRVIQHCPPPKS | | CTTATCTGATAAGTGTTCTC |
| | | RSPSSASGSTSTGHVTSLPSSGSNQ | | AGTTCGCCATTCCTTCCCTG |
| | | EANIPLLPHMSIPNHPGGMGITVF | | TGCCACTATGCCTTCCCGTA |
| | | GNKSQKPYKIDSKQASLLGDANIHG | | CTGCGATGAAACTTCATCCG |
| | | HTESMISAEL | | TCCCAAAGCCCCGTGACTTG |
| | | | | TGTCGCGATGAATGTGAAA |
| | | | | TCCTGGAGAATGTCCTGTGT |
| | | | | CAAACAGAGTACATTTTTGC |
| | | | | AAGATCAAATCCCATGATTC |
| | | | | TGATGAGGCTGAAACTGCC |
| | | | | AAACTGTGAAGATCTCCCCC |
| | | | | AGCCAGAGAGCCCAGAAGC |
| | | | | TGCGAACTGTATCCGGATT |
| | | | | GGAATTCCCATGGCAGATC |
| | | | | CTATAAATAAAAATCACAA |
| | | | | GTGTTATAACAGCACAGGT |
| | | | | GTGGACTACCGGGGGACCG |
| | | | | TCAGTGTGACCAAATCAGG |
| | | | | GCGCCAGTGCCAGCCATGG |
| | | | | AATTCCCAGTATCCCCACAC |
| | | | | ACACACTTTCACCGCCCTTC |
| | | | | GTTTCCCAGAGCTGAATGG |
| | | | | AGGCCATTCCTACTGCCGCA |
| | | | | ACCCAGGGAATCAAAAGGA |
| | | | | AGCTCCCTGGTGCTTCACCT |
| | | | | TGGATGAAAACTTTAAGTCT |
| | | | | GATCTGTGTGACATCCCAG |
| | | | | CGTGCGATTCAAAGGATTC |
| | | | | CAAGGAGAAGAATAAAATG |
| | | | | GAAATCCTGTACATACTAGT |
| | | | | GCCAAGTGTGGCCATTCCC |
| | | | | CTGGCCATTGCTTTACTCTT |
| | | | | CTTCTTCATTTGCGTCTGTC |
| | | | | GGAATAACCAGAAGTCATC |
| | | | | GTCGGCACCAGTCCAGAGG |
| | | | | CAACCAAAACACGTCAGAG |
| | | | | GTCAAAATGTAGAGATGTC |
| | | | | AATGCTGAATGCATATAAA |
| | | | | CCCAAGAGCAAGGCTAAAG |
| | | | | AGCTACCTCTTTCTGCTGTA |
| | | | | CGCTTTATGGAAGAATTGG |
| | | | | GTGAGTGTGCCTTTGGAAA |
| | | | | AATCTATAAAGGCCATCTCT |
| | | | | ATCTCCCAGGCATGGACCAT |
| | | | | GCTCAGCTGGTTGCTATCAA |
| | | | | GACCTTGAAAGACTATAAC |
| | | | | AACCCCCAGCAATGGACGG |
| | | | | AATTTCAACAAGAAGCCTCC |
| | | | | CTAATGGCAGAACTGCACC |
| | | | | ACCCCAATATTGTCTGCCTT |
| | | | | CTAGGTGCCGTCACTCAGG |
| | | | | AACAACCTGTGTGCATGCTT |
| | | | | TTTGAGTATATTAATCAGGG |
| | | | | GGATCTCCATGAGTTCCTCA |
| | | | | TCATGAGATCCCCACACTCT |
| | | | | GATGTTGGCTGCAGCAGTG |
| | | | | ATGAAGATGGGACTGTGAA |
| | | | | ATCCAGCCTGGACCACGGA |
| | | | | GATTTTCTGCACATTGCAAT |
| | | | | TCAGATTGCAGCTGGCATG |
| | | | | GAATACCTGTCTAGTCACTT |
| | | | | CTTTGTCCACAAGGACCTTG |
| | | | | CAGCTCGCAATATTTTAATC |
| | | | | GGAGAGCAACTTCATGTAA |
| | | | | AGATTTCAGACTTGGGGCT |
| | | | | TTCCAGAGAAATTTACTCCG |
| | | | | CTGATTACTACAGGGTCCA |
| | | | | GAGTAAGTCCTTGCTGCCC |
| | | | | ATTCGCTGGATGCCCCCTGA |
| | | | | AGCCATCATGTATGGCAAA |
| | | | | TTCTCTTCTGATTCAGATAT |
| | | | | CTGGTCCTTTGGGGTTGTCT |
| | | | | TGTGGGAGATTTTCAGTTTT |
| | | | | GGACTCCAGCCATATTATG |
| | | | | GATTCAGTAACCAGGAAGT |
| | | | | GATTGAGATGGTGAGAAAA |
| | | | | CGGCAGCTCTTACCATGCTC |
| | | | | TGAAGACTGCCCACCCAGA |
| | | | | ATGTACAGCCTCATGACAG |
| | | | | AGTGCTGGAATGAGATTCC |
| | | | | TTCTAGGAGACCAAGATTTA |
| | | | | AAGATATTCACGTCCGGCTT |
| | | | | CGGTCCTGGGAGGGACTCT |
| | | | | CAAGTCACACAAGCTCTACT |
| | | | | ACTCCTTCAGGGGGAAATG |
| | | | | CCACCACACAGACAACCTCC |
| | | | | CTCAGTGCCAGCCCAGTGA |
| | | | | GTAATCTCAGTAACCCCAGA |
| | | | | TATCCTAATTACATGTTCCC |
| | | | | GAGCCAGGGTATTACACCA |
| | | | | CAGGGCCAGATTGCTGGTT |
| | | | | TCATTGGCCCGCCAATACCT |
| | | | | CAGAACCAGCGATTCATTCC |
| | | | | CATCAATGGATACCCAATAC |
| | | | | CTCCTGGATATGCAGCGTTT |
| | | | | CCAGCTGCCCACTACCAGCC |
| | | | | AACAGGTCCTCCCAGAGTG |
| | | | | ATTCAGCACTGCCCACCTCC |
| | | | | CAAGAGTCGGTCCCCAAGC |
| | | | | AGTGCCAGTGGGTCGACTA |
| | | | | GCACTGGCCATGTGACTAG |
| | | | | CTTGCCCTCATCAGGATCCA |
| | | | | ATCAGGAAGCAAATATTCCT |
| | | | | TTACTACCACACATGTCAAT |
| | | | | TCCAAATCATCCTGGTGGAA |
| | | | | TGGGTATCACCGTTTTTGGC |
| | | | | AACAAATCTCAAAAACCCTA |
| | | | | CAAAATTGACTCAAAGCAA |
| | | | | GCATCTTTACTAGGAGACG |
| | | | | CCAATATTCATGGACACACC |
| | | | | GAATCTATGATTTCTGCAGA |
| | | | | ACTG |
| Human ROR1 | 589 | MHRPRRRGTRPPLLALLAALLLAAR | 590 | ATGCACCGGCCGCGCCGCC |
| (1-437) | | GAAAQETELSVSAELVPTSSWNISS | | GCGGGACGCGCCCGCCGCT |
| | | ELNKDSYLTLDEPMNNITTSLGQTA | | CCTGGCGCTGCTGGCCGCG |
| | | ELHCKVSGNPPPTIRWFKNDAPVV | | CTGCTGCTGGCCGCACGCG |
| | | QEPRRLSFRSTIYGSRLRIRNLDTTD | | GGGCTGCTGCCCAAGAAAC |
| | | TGYFQCVATNGKEVVSSTGVLFVK | | AGAGCTGTCAGTCAGTGCT |
| | | FGPPPTASPGYSDEYEEDGFCQPYR | | GAATTAGTGCCTACCTCATC |
| | | GIACARFIGNRTVYMESLHMQGEI | | ATGGAACATCTCAAGTGAA |
| | | ENQITAAFTMIGTSSHLSDKCSQFA | | CTCAACAAAGATTCTTACCT |
| | | IPSLCHYAFPYCDETSSVPKPRDLCR | | GACCCTCGATGAACCAATG |
| | | DECEILENVLCQTEYIFARSNPMIL | | AATAACATCACCACGTCTCT |
| | | MRLKLPNCEDLPQPESPEAANCIRI | | GGGCCAGACAGCAGAACTG |
| | | GIPMADPINKNHKCYNSTGVDYRG | | CACTGCAAAGTCTCTGGGA |
| | | TVSVTKSGRQCQPWNSQYPHTHT | | ATCCACCTCCCACCATCCGC |
| | | FTALRFPELNGGHSYCRNPGNQKE | | TGGTTCAAAAATGATGCTCC |
| | | APWCFTLDENFKSDLCDIPACDSKD | | TGTGGTCCAGGAGCCCCGG |
| | | SKEKNKMEILYILVPSVAIPLAIALLF | | AGGCTCTCCTTTCGGTCCAC |
| | | FFICVCRNNQKSSSA | | CATCTATGGCTCTCGGCTGC |
| | | | | GGATTAGAAACCTCGACAC |
| | | | | CACAGACACAGGCTACTTCC |
| | | | | AGTGCGTGGCAACAAACGG |
| | | | | CAAGGAGGTGGTTTCTTCC |
| | | | | ACTGGAGTCTTGTTTGTCAA |
| | | | | GTTTGGCCCCCCTCCCACTG |
| | | | | CAAGTCCAGGATACTCAGA |
| | | | | TGAGTATGAAGAAGATGGA |
| | | | | TTCTGTCAGCCATACAGAG |
| | | | | GGATTGCATGTGCAAGATT |
| | | | | TATTGGCAACCGCACCGTCT |
| | | | | ATATGGAGTCTTTGCACATG |
| | | | | CAAGGGGAAATAGAAAATC |
| | | | | AGATCACAGCTGCCTTCACT |
| | | | | ATGATTGGCACTTCCAGTCA |
| | | | | CTTATCTGATAAGTGTTCTC |
| | | | | AGTTCGCCATTCCTTCCCTG |
| | | | | TGCCACTATGCCTTCCCGTA |
| | | | | CTGCGATGAAACTTCATCCG |
| | | | | TCCCAAAGCCCCGTGACTTG |
| | | | | TGTCGCGATGAATGTGAAA |
| | | | | TCCTGGAGAATGTCCTGTGT |
| | | | | CAAACAGAGTACATTTTTGC |
| | | | | AAGATCAAATCCCATGATTC |
| | | | | TGATGAGGCTGAAACTGCC |
| | | | | AAACTGTGAAGATCTCCCCC |
| | | | | AGCCAGAGAGCCCAGAAGC |
| | | | | TGCGAACTGTATCCGGATT |
| | | | | GGAATTCCCATGGCAGATC |
| | | | | CTATAAATAAAAATCACAA |
| | | | | GTGTTATAACAGCACAGGT |
| | | | | GTGGACTACCGGGGGACCG |
| | | | | TCAGTGTGACCAAATCAGG |
| | | | | GCGCCAGTGCCAGCCATGG |
| | | | | AATTCCCAGTATCCCCACAC |
| | | | | ACACACTTTCACCGCCCTTC |
| | | | | GTTTCCCAGAGCTGAATGG |
| | | | | AGGCCATTCCTACTGCCGCA |
| | | | | ACCCAGGGAATCAAAAGGA |
| | | | | AGCTCCCTGGTGCTTCACCT |
| | | | | TGGATGAAAACTTTAAGTCT |
| | | | | GATCTGTGTGACATCCCAG |
| | | | | CGTGCGATTCAAAGGATTC |
| | | | | CAAGGAGAAGAATAAAATG |
| | | | | GAAATCCTGTACATACTAGT |
| | | | | GCCAAGTGTGGCCATTCCC |
| | | | | CTGGCCATTGCTTTACTCTT |
| | | | | CTTCTTCATTTGCGTCTGTC |
| | | | | GGAATAACCAGAAGTCATC |
| | | | | GTCGGCA |
| Murine ROR1 | 591 | DIKMTQSPSSMYASLGERVTITCKA | 592 | GACATCAAGATGACCCAGA |
| (VL-VH). | | SPDINSYLSWFQQKPGKSPKTLIYR | | GCCCCAGCTCTATGTACGCC |
| IgG4 Fc- | | ANRLVDGVPSRFSGGGSGQDYSLT | | AGCCTGGGCGAGCGCGTGA |
| CD28m-Z | | INSLEYEDMGIYYCLQYDEFPYTFG | | CCATCACATGCAAGGCCAG |
| | | GGTKLEMKGSTSGSGKPGSGEGST | | CCCCGACATCAACAGCTACC |
| | | KGEVKLVESGGGLVKPGGSLKLSCA | | TGTCCTGGTTCCAGCAGAA |
| | | ASGFTFSSYAMSWVRQIPEKRLEW | | GCCCGGCAAGAGCCCCAAG |
| | | VASISRGGTTYYPDSVKGRFTISRD | | ACCCTGATCTACCGGGCCA |
| | | NVRNILYLQMSSLRSEDTAMYYCG | | ACCGGCTGGTGGACGGCGT |
| | | RYDYDGYYAMDYWGQGTSVTVSS | | GCCAAGCAGATTTTCCGGC |
| | | ESKYGPPCPPCPAPEFEGGPSVFLF | | GGAGGCAGCGGCCAGGAC |
| | | PPKPKDTLMISRTPEVTCVVVDVSQ | | TACAGCCTGACCATCAACA |
| | | EDPEVQFNWYVDGVEVHNAKTKP | | GCCTGGAATACGAGGACAT |
| | | REEQFQSTYRVVSVLTVLHQDWLN | | GGGCATCTACTACTGCCTGC |
| | | GKEYKCKVSNKGLPSSIEKTISKAKG | | AGTACGACGAGTTCCCCTAC |
| | | QPREPQVYTLPPSQEEMTKNQVSL | | ACCTTCGGAGGCGGCACCA |
| | | TCLVKGFYPSDIAVEWESNGQPEN | | AGCTGGAAATGAAGGGCA |
| | | NYKTTPPVLDSDGSFFLYSRLTVDKS | | GCACCTCCGGCAGCGGCAA |
| | | QKSLSLSLGKMFWVLVVVGGVLAC | | GCCTGGCAGCGGCGAGGG |
| | | YSLLVTVAFIIFWVRSKRSRGGHSD | | CAGCACCAAGGGCGAAGTG |
| | | YMNMTPRRPGPTRKHYQPYAPPR | | AAGCTGGTGGAAAGCGGC |
| | | DFAAYRSRVKFSRSADAPAYQQGQ | | GGAGGCCTGGTGAAACCTG |
| | | NCILYNELNLGRREEYDVLDKRRGR | | CTGCGCCGCCAGCGGCTTC |
| | | DPEMGGKPRRKNPQEGLYNELQK | | ACCTTCAGCAGCTACGCCAT |
| | | DKMAEAYSEIGMKGERRRGKGHD | | GAGCTGGGTCCGACAGATC |
| | | GLYQGLSTATKDTYDALHMQALPP | | CCCGAGAAGCGGCTGGAAT |
| | | R | | GGGTGGCCAGCATCAGCAG |
| | | | | GGGCGGCACCACCTACTAC |
| | | | | CCCGACAGCGTGAAGGGCC |
| | | | | GGTTCACCATCAGCCGGGA |
| | | | | CAACGTGCGGAACATCCTG |
| | | | | TACCTGCAGATGAGCAGCC |
| | | | | TGCGGAGCGAGGACACCGC |
| | | | | CATGTACTACTGCGGCAGA |
| | | | | TACGACTACGACGGCTACT |
| | | | | ACGCCATGGATTACTGGGG |
| | | | | CCAGGGCACCAGCGTGACC |
| | | | | GTGTCTAGCGAGAGCAAGT |
| | | | | ACGGCCCTCCCTGCCCCCCT |
| | | | | TGCCCTGCCCCCGAGTTCGA |
| | | | | GGGCGGACCCAGCGTGTTC |
| | | | | CTGTTCCCCCCCAAGCCCAA |
| | | | | GGACACCCTGATGATCAGC |
| | | | | CGGACCCCCGAGGTGACCT |
| | | | | GTGTGGTGGTGGACGTGTC |
| | | | | CCAGGAGGACCCCGAGGTC |
| | | | | CAGTTCAACTGGTACGTGG |
| | | | | ACGGCGTGGAGGTGCACAA |
| | | | | CGCCAAGACCAAGCCCCGG |
| | | | | GAGGAGCAGTTCCAGAGCA |
| | | | | CCTACCGGGTGGTGTCCGT |
| | | | | GCTGACCGTGCTGCACCAG |
| | | | | GACTGGCTGAACGGCAAGG |
| | | | | AATACAAGTGTAAGGTGTC |
| | | | | CAACAAGGGCCTGCCCAGC |
| | | | | AGCATCGAGAAAACCATCA |
| | | | | GCAAGGCCAAGGGCCAGCC |
| | | | | TCGGGAGCCCCAGGTGTAC |
| | | | | ACCCTGCCCCCTAGCCAAGA |
| | | | | GGAGATGACCAAGAATCAG |
| | | | | GTGTCCCTGACCTGCCTGGT |
| | | | | GAAGGGCTTCTACCCCAGC |
| | | | | GACATCGCCGTGGAGTGGG |
| | | | | AGAGCAACGGCCAGCCCGA |
| | | | | GAACAACTACAAGACCACC |
| | | | | CCCCCTGTGCTGGACAGCG |
| | | | | ACGGCAGCTTCTTCCTGTAC |
| | | | | AGCAGGCTGACCGTGGACA |
| | | | | AGAGCCGGTGGCAGGAGG |
| | | | | GCAACGTCTTTAGCTGCTCC |
| | | | | GTGATGCACGAGGCCCTGC |
| | | | | ACAACCACTACACCCAGAA |
| | | | | GAGCCTGTCCCTGAGCCTG |
| | | | | GGCAAGATGTTCTGGGTGC |
| | | | | TGGTCGTGGTGGGTGGCGT |
| | | | | GCTGGCCTGCTACAGCCTG |
| | | | | CTGGTGACAGTGGCCTTCA |
| | | | | TCATCTTTTGGGTGAGGAG |
| | | | | CAAGCGGAGCAGAGGCGG |
| | | | | CCACAGCGACTACATGAAC |
| | | | | ATGACCCCCCGGAGGCCTG |
| | | | | GCCCCACCCGGAAGCACTA |
| | | | | CCAGCCCTACGCCCCTCCCA |
| | | | | GGGACTTCGCCGCCTACCG |
| | | | | GAGCCGGGTGAAGTTCAGC |
| | | | | CGGAGCGCCGACGCCCCTG |
| | | | | CCTACCAGCAGGGCCAGAA |
| | | | | CCAGCTGTACAACGAGCTG |
| | | | | AACCTGGGCCGGAGGGAG |
| | | | | GAGTACGACGTGCTGGACA |
| | | | | AGCGGAGAGGCCGGGACC |
| | | | | CTGAGATGGGCGGCAAGCC |
| | | | | CCGGAGAAAGAACCCTCAG |
| | | | | GAGGGCCTGTATAACGAAC |
| | | | | TGCAGAAAGACAAGATGGC |
| | | | | CGAGGCCTACAGCGAGATC |
| | | | | GGCATGAAGGGCGAGCGG |
| | | | | CGGAGGGGCAAGGGCCAC |
| | | | | GACGGCCTGTACCAGGGCC |
| | | | | TGAGCACCGCCACCAAGGA |
| | | | | TACCTACGACGCCCTGCACA |
| | | | | TGCAGGCCCTGCCCCCCAG |
| | | | | A |
| Murine ROR1 | 593 | DIKMTQSPSSMYASLGERVTITCKA | 594 | GACATCAAGATGACCCAGA |
| (VL-VH). | | SPDINSYLSWFQQKPGKSPKTLIYR | | GCCCCAGCTCTATGTACGCC |
| IgG4 Fcm- | | ANRLVDGVPSRFSGGGSGQDYSLT | | AGCCTGGGCGAGCGCGTGA |
| CD28m-Z | | INSLEYEDMGIYYCLQYDEFPYTFG | | CCATCACATGCAAGGCCAG |
| | | GGTKLEMKGSTSGSGKPGSGEGST | | CCCCGACATCAACAGCTACC |
| | | KGEVKLVESGGGLVKPGGSLKLSCA | | TGTCCTGGTTCCAGCAGAA |
| | | ASGFTFSSYAMSWVRQIPEKRLEW | | GCCCGGCAAGAGCCCCAAG |
| | | VASISRGGTTYYPDSVKGRFTISRD | | ACCCTGATCTACCGGGCCA |
| | | NVRNILYLQMSSLRSEDTAMYYCG | | ACCGGCTGGTGGACGGCGT |
| | | RYDYDGYYAMDYWGQGTSVTVSS | | GCCAAGCAGATTTTCCGGC |
| | | QGTSVTVSSESKYGPPCPPCPAPEF | | GGAGGCAGCGGCCAGGAC |
| | | LGGPSVFLFPPKPKDTLMISRTPEVT | | TACAGCCTGACCATCAACA |
| | | CVVVDVSQEDPEVQFNWYVDGVE | | GCCTGGAATACGAGGACAT |
| | | VHNAKTKPREEQFNSTYRVVSVLT | | GGGCATCTACTACTGCCTGC |
| | | VLHQDWLNGKEYKCKVSNKGLPSS | | AGTACGACGAGTTCCCCTAC |
| | | IEKTISKAKGQPREPQVYTLPPSQEE | | ACCTTCGGAGGCGGCACCA |
| | | MTKNQVSLTCLVKGFYPSDIAVEW | | AGCTGGAAATGAAGGGCA |
| | | ESNGQPENNYKTTPPVLDSDGSFFL | | GCACCAGCGGCAGCGGCAA |
| | | YSRLTVDKSRWQEGNVFSCSVMH | | GCCTGGAAGCGGCGAGGG |
| | | EALHNHYTQKSLSLSLGKMFWVLV | | CTCCACCAAGGGCGAAGTG |
| | | VVGGVLACYSLLVTVAFIIFWVRSK | | AAGCTGGTGGAAAGCGGC |
| | | RSRGGHSDYMNMTPRRPGPTRKH | | GGAGGCCTGGTGAAACCTG |
| | | YQPYAPPRDFAAYRSRVKFSRSAD | | GCGGCAGCCTGAAGCTGAG |
| | | APAYQQGQNQLYNELNLGRREEY | | CTGCGCCGCCAGCGGCTTC |
| | | DVLDKRRGRDPEMGGKPRRKNPQ | | ACCTTCAGCAGCTACGCCAT |
| | | EGLYNELQKDKMAEAYSEIGMKGE | | GAGCTGGGTCCGACAGATC |
| | | RRRGKGHDGLYQGLSTATKDTYDA | | CCCGAGAAGCGGCTGGAAT |
| | | LHMQALPPR | | GGGTGGCCAGCATCAGCAG |
| | | | | GGGCGGCACCACCTACTAC |
| | | | | CCCGACAGCGTGAAGGGCC |
| | | | | GGTTCACCATCAGCCGGGA |
| | | | | CAACGTGCGGAACATCCTG |
| | | | | TACCTGCAGATGAGCAGCC |
| | | | | TGCGGAGCGAGGACACCGC |
| | | | | CATGTACTACTGCGGCAGA |
| | | | | TACGACTACGACGGCTACT |
| | | | | ACGCCATGGATTACTGGGG |
| | | | | CCAGGGCACCAGCGTGACC |
| | | | | GTGTCTAGCCAGGGAACCT |
| | | | | CCGTGACAGTGTCCAGCGA |
| | | | | GTCCAAATATGGTCCCCCAT |
| | | | | GCCCACCATGCCCAGCACCT |
| | | | | GAGTTCCTGGGGGGACCAT |
| | | | | CAGTCTTCCTGTTCCCCCCA |
| | | | | AAACCCAAGGACACTCTCAT |
| | | | | GATCTCCCGGACCCCTGAG |
| | | | | GTCACGTGCGTGGTGGTGG |
| | | | | ACGTGAGCCAGGAAGACCC |
| | | | | CGAGGTCCAGTTCAACTGG |
| | | | | TACGTGGATGGCGTGGAGG |
| | | | | TGCATAATGCCAAGACAAA |
| | | | | GCCCCGGGAGGAGCAGTTC |
| | | | | AATAGCACCTACCGGGTGG |
| | | | | TGTCCGTGCTGACCGTGCT |
| | | | | GCACCAGGACTGGCTGAAC |
| | | | | GGCAAGGAATACAAGTGTA |
| | | | | AGGTGTCCAACAAGGGCCT |
| | | | | GCCCAGCAGCATCGAGAAA |
| | | | | ACCATCAGCAAGGCCAAGG |
| | | | | GCCAGCCTCGGGAGCCCCA |
| | | | | GGTGTACACCCTGCCCCCTA |
| | | | | GCCAAGAGGAGATGACCAA |
| | | | | GAATCAGGTGTCCCTGACC |
| | | | | TGCCTGGTGAAGGGCTTCT |
| | | | | ACCCCAGCGACATCGCCGT |
| | | | | GGAGTGGGAGAGCAACGG |
| | | | | CCAGCCCGAGAACAACTAC |
| | | | | AAGACCACCCCCCCTGTGCT |
| | | | | GGACAGCGACGGCAGCTTC |
| | | | | TTCCTGTACAGCAGGCTGA |
| | | | | CCGTGGACAAGAGCCGGTG |
| | | | | GCAGGAGGGCAACGTCTTT |
| | | | | AGCTGCTCCGTGATGCACG |
| | | | | AGGCCCTGCACAACCACTA |
| | | | | CACCCAGAAGAGCCTGTCC |
| | | | | CTGAGCCTGGGCAAGATGT |
| | | | | TCTGGGTGCTGGTCGTGGT |
| | | | | GGGTGGCGTGCTGGCCTGC |
| | | | | TACAGCCTGCTGGTGACAG |
| | | | | TGGCCTTCATCATCTTTTGG |
| | | | | GTGAGGAGCAAGCGGAGC |
| | | | | AGAGGCGGCCACAGCGACT |
| | | | | ACATGAACATGACCCCCCG |
| | | | | GAGGCCTGGCCCCACCCGG |
| | | | | AAGCACTACCAGCCCTACG |
| | | | | CCCCTCCCAGGGACTTCGCC |
| | | | | GCCTACCGGAGCCGGGTGA |
| | | | | AGTTCAGCCGGAGCGCCGA |
| | | | | CGCCCCTGCCTACCAGCAG |
| | | | | GGCCAGAACCAGCTGTACA |
| | | | | ACGAGCTGAACCTGGGCCG |
| | | | | GAGGGAGGAGTACGACGT |
| | | | | GCTGGACAAGCGGAGAGG |
| | | | | CCGGGACCCTGAGATGGGC |
| | | | | GGCAAGCCCCGGAGAAAG |
| | | | | AACCCTCAGGAGGGCCTGT |
| | | | | ATAACGAACTGCAGAAAGA |
| | | | | CAAGATGGCCGAGGCCTAC |
| | | | | AGCGAGATCGGCATGAAGG |
| | | | | GCGAGCGGCGGAGGGGCA |
| | | | | AGGGCCACGACGGCCTGTA |
| | | | | CCAGGGCCTGAGCACCGCC |
| | | | | ACCAAGGATACCTACGACG |
| | | | | CCCTGCACATGCAGGCCCT |
| | | | | GCCCCCCAGA |
| Murine ROR1 | 595 | DIKMTQSPSSMYASLGERVTITCKA | 596 | GACATCAAGATGACCCAGA |
| (VL-VH). | | SPDINSYLSWFQQKPGKSPKTLIYR | | GCCCCAGCTCTATGTACGCC |
| CD8α. | | ANRLVDGVPSRFSGGGSGQDYSLT | | AGCCTGGGCGAGCGCGTGA |
| CD28z | | INSLEYEDMGIYYCLQYDEFPYTFG | | CCATCACATGCAAGGCCAG |
| | | GGTKLEMKGSTSGSGKPGSGEGST | | CCCCGACATCAACAGCTACC |
| | | KGEVKLVESGGGLVKPGGSLKLSCA | | TGTCCTGGTTCCAGCAGAA |
| | | ASGFTFSSYAMSWVRQIPEKRLEW | | GCCCGGCAAGAGCCCCAAG |
| | | VASISRGGTTYYPDSVKGRFTISRD | | ACCCTGATCTACCGGGCCA |
| | | NVRNILYLQMSSLRSEDTAMYYCG | | ACCGGCTGGTGGACGGCGT |
| | | RYDYDGYYAMDYWGQGTSVTVSS | | GCCAAGCAGATTTTCCGGC |
| | | KPTTTPAPRPPTPAPTIASQPLSLRP | | GGAGGCAGCGGCCAGGAC |
| | | EACRPAAGGAVHTRGLDFACDIYI | | TACAGCCTGACCATCAACA |
| | | WAPLAGTCGVLLLSLVITLYCNHRN | | GCCTGGAATACGAGGACAT |
| | | RSKRSRGGHSDYMNMTPRRPGPT | | GGGCATCTACTACTGCCTGC |
| | | RKHYQPYAPPRDFAAYRSRVKFSRS | | AGTACGACGAGTTCCCCTAC |
| | | ADAPAYQQGQNQLYNELNLGRRE | | ACCTTCGGAGGCGGCACCA |
| | | EYDVLDKRRGRDPEMGGKPRRKN | | AGCTGGAAATGAAGGGCA |
| | | PQEGLYNELQKDKMAEAYSEIGMK | | GCACCTCCGGCAGCGGCAA |
| | | GERRRGKGHDGLYQGLSTATKDTY | | GCCTGGCAGCGGCGAGGG |
| | | DALHMQALPPR | | CAGCACCAAGGGCGAAGTG |
| | | | | AAGCTGGTGGAAAGCGGC |
| | | | | GGAGGCCTGGTGAAACCTG |
| | | | | GCGGCAGCCTGAAGCTGAG |
| | | | | CTGCGCCGCCAGCGGCTTC |
| | | | | ACCTTCAGCAGCTACGCCAT |
| | | | | GAGCTGGGTCCGACAGATC |
| | | | | CCCGAGAAGCGGCTGGAAT |
| | | | | GGGTGGCCAGCATCAGCAG |
| | | | | GGGCGGCACCACCTACTAC |
| | | | | CCCGACAGCGTGAAGGGCC |
| | | | | GGTTCACCATCAGCCGGGA |
| | | | | CAACGTGCGGAACATCCTG |
| | | | | TACCTGCAGATGAGCAGCC |
| | | | | TGCGGAGCGAGGACACCGC |
| | | | | CATGTACTACTGCGGCAGA |
| | | | | TACGACTACGACGGCTACT |
| | | | | ACGCCATGGATTACTGGGG |
| | | | | CCAGGGCACCAGCGTGACC |
| | | | | GTGTCTAGCAAGCCCACCA |
| | | | | CCACCCCTGCCCCTAGACCT |
| | | | | CCAACCCCAGCCCCTACAAT |
| | | | | CGCCAGCCAGCCCCTGAGC |
| | | | | CTGAGGCCCGAAGCCTGTA |
| | | | | GACCTGCCGCTGGCGGAGC |
| | | | | CGTGCACACCAGAGGCCTG |
| | | | | GATTTCGCCTGCGACATCTA |
| | | | | CATCTGGGCCCCTCTGGCC |
| | | | | GGCACCTGTGGCGTGCTGC |
| | | | | TGCTGAGCCTGGTCATCACC |
| | | | | CTGTACTGCAACCACCGGA |
| | | | | ATAGGAGCAAGCGGAGCA |
| | | | | GAGGCGGCCACAGCGACTA |
| | | | | CATGAACATGACCCCCCGG |
| | | | | AGGCCTGGCCCCACCCGGA |
| | | | | AGCACTACCAGCCCTACGCC |
| | | | | CCTCCCAGGGACTTCGCCG |
| | | | | CCTACCGGAGCCGGGTGAA |
| | | | | GTTCAGCCGGAGCGCCGAC |
| | | | | GCCCCTGCCTACCAGCAGG |
| | | | | GCCAGAACCAGCTGTACAA |
| | | | | CGAGCTGAACCTGGGCCGG |
| | | | | AGGGAGGAGTACGACGTG |
| | | | | CTGGACAAGCGGAGAGGCC |
| | | | | GGGACCCTGAGATGGGCG |
| | | | | GCAAGCCCCGGAGAAAGAA |
| | | | | CCCTCAGGAGGGCCTGTAT |
| | | | | AACGAACTGCAGAAAGACA |
| | | | | AGATGGCCGAGGCCTACAG |
| | | | | CGAGATCGGCATGAAGGGC |
| | | | | GAGCGGCGGAGGGGCAAG |
| | | | | GGCCACGACGGCCTGTACC |
| | | | | AGGGCCTGAGCACCGCCAC |
| | | | | CAAGGATACCTACGACGCC |
| | | | | CTGCACATGCAGGCCCTGC |
| | | | | CCCCCAGA |
| Murine ROR1 | 597 | DIKMTQSPSSMYASLGERVTITCKA | 598 | GACATCAAGATGACCCAGA |
| (VL-VH). | | SPDINSYLSWFQQKPGKSPKTLIYR | | GCCCCAGCTCTATGTACGCC |
| CD8α(2x). | | ANRLVDGVPSRFSGGGSGQDYSLT | | AGCCTGGGCGAGCGCGTGA |
| CD28z | | INSLEYEDMGIYYCLQYDEFPYTFG | | CCATCACATGCAAGGCCAG |
| | | GGTKLEMKGSTSGSGKPGSGEGST | | CCCCGACATCAACAGCTACC |
| | | KGEVKLVESGGGLVKPGGSLKLSCA | | TGTCCTGGTTCCAGCAGAA |
| | | ASGFTFSSYAMSWVRQIPEKRLEW | | GCCCGGCAAGAGCCCCAAG |
| | | VASISRGGTTYYPDSVKGRFTISRD | | ACCCTGATCTACCGGGCCA |
| | | NVRNILYLQMSSLRSEDTAMYYCG | | ACCGGCTGGTGGACGGCGT |
| | | RYDYDGYYAMDYWGQGTSVTVSS | | GCCAAGCAGATTTTCCGGC |
| | | KPTTTPAPRPPTPAPTIASQPLSLRP | | GGAGGCAGCGGCCAGGAC |
| | | EASRPAAGGAVHTRGLDFASDKPT | | TACAGCCTGACCATCAACA |
| | | TTPAPRPPTPAPTIASQPLSLRPEAC | | GCCTGGAATACGAGGACAT |
| | | RPAAGGAVHTRGLDFACDIYIWAP | | GGGCATCTACTACTGCCTGC |
| | | LAGTCGVLLLSLVITLYCNHRNRSKR | | AGTACGACGAGTTCCCCTAC |
| | | SRGGHSDYMNMTPRRPGPTRKHY | | ACCTTCGGAGGCGGCACCA |
| | | QPYAPPRDFAAYRSRVKFSRSADA | | AGCTGGAAATGAAGGGCA |
| | | PAYQQGQNQLYNELNLGRREEYD | | GCACCTCCGGCAGCGGCAA |
| | | VLDKRRGRDPEMGGKPRRKNPQE | | GCCTGGCAGCGGCGAGGG |
| | | GLYNELQKDKMAEAYSEIGMKGER | | CAGCACCAAGGGCGAAGTG |
| | | RRGKGHDGLYQGLSTATKDTYDAL | | AAGCTGGTGGAAAGCGGC |
| | | HMQALPPR | | GGAGGCCTGGTGAAACCTG |
| | | | | GCGGCAGCCTGAAGCTGAG |
| | | | | CTGCGCCGCCAGCGGCTTC |
| | | | | ACCTTCAGCAGCTACGCCAT |
| | | | | GAGCTGGGTCCGACAGATC |
| | | | | CCCGAGAAGCGGCTGGAAT |
| | | | | GGGTGGCCAGCATCAGCAG |
| | | | | GGGCGGCACCACCTACTAC |
| | | | | CCCGACAGCGTGAAGGGCC |
| | | | | GGTTCACCATCAGCCGGGA |
| | | | | CAACGTGCGGAACATCCTG |
| | | | | TACCTGCAGATGAGCAGCC |
| | | | | TGCGGAGCGAGGACACCGC |
| | | | | CATGTACTACTGCGGCAGA |
| | | | | TACGACTACGACGGCTACT |
| | | | | ACGCCATGGATTACTGGGG |
| | | | | CCAGGGCACCAGCGTGACC |
| | | | | GTGTCTAGCAAACCTACTAC |
| | | | | AACTCCTGCCCCCCGGCCTC |
| | | | | CTACACCAGCTCCTACTATC |
| | | | | GCCTCCCAGCCACTCAGTCT |
| | | | | CAGACCCGAGGCTTCTAGG |
| | | | | CCAGCGGCCGGAGGCGCG |
| | | | | GTCCACACCCGCGGGCTGG |
| | | | | ACTTTGCATCCGATAAGCCC |
| | | | | ACCACCACCCCTGCCCCTAG |
| | | | | ACCTCCAACCCCAGCCCCTA |
| | | | | CAATCGCCAGCCAGCCCCT |
| | | | | GAGCCTGAGGCCCGAAGCC |
| | | | | TGTAGACCTGCCGCTGGCG |
| | | | | GAGCCGTGCACACCAGAGG |
| | | | | CCTGGATTTCGCCTGCGACA |
| | | | | TCTACATCTGGGCCCCTCTG |
| | | | | GCCGGCACCTGTGGCGTGC |
| | | | | TGCTGCTGAGCCTGGTCATC |
| | | | | ACCCTGTACTGCAACCACCG |
| | | | | GAATAGGAGCAAGCGGAG |
| | | | | CAGAGGCGGCCACAGCGAC |
| | | | | TACATGAACATGACCCCCCG |
| | | | | GAGGCCTGGCCCCACCCGG |
| | | | | AAGCACTACCAGCCCTACG |
| | | | | CCCCTCCCAGGGACTTCGCC |
| | | | | GCCTACCGGAGCCGGGTGA |
| | | | | AGTTCAGCCGGAGCGCCGA |
| | | | | CGCCCCTGCCTACCAGCAG |
| | | | | GGCCAGAACCAGCTGTACA |
| | | | | ACGAGCTGAACCTGGGCCG |
| | | | | GAGGGAGGAGTACGACGT |
| | | | | GCTGGACAAGCGGAGAGG |
| | | | | CCGGGACCCTGAGATGGGC |
| | | | | GGCAAGCCCCGGAGAAAG |
| | | | | AACCCTCAGGAGGGCCTGT |
| | | | | ATAACGAACTGCAGAAAGA |
| | | | | CAAGATGGCCGAGGCCTAC |
| | | | | AGCGAGATCGGCATGAAGG |
| | | | | GCGAGCGGCGGAGGGGCA |
| | | | | AGGGCCACGACGGCCTGTA |
| | | | | CCAGGGCCTGAGCACCGCC |
| | | | | ACCAAGGATACCTACGACG |
| | | | | CCCTGCACATGCAGGCCCT |
| | | | | GCCCCCCAGA |
| Murine | 599 | DIKMTQSPSSMYASLGERVTITCKA | 600 | GACATCAAGATGACCCAGA |
| ROR1 | | SPDINSYLSWFQQKPGKSPKTLIYR | | GCCCCAGCTCTATGTACGCC |
| (VL-VH). | | ANRLVDGVPSRFSGGGSGQDYSLT | | AGCCTGGGCGAGCGCGTGA |
| CD8a(3x). | | INSLEYEDMGIYYCLQYDEFPYTFG | | CCATCACATGCAAGGCCAG |
| CD28z | | GGTKLEMKGSTSGSGKPGSGEGST | | CCCCGACATCAACAGCTACC |
| | | KGEVKLVESGGGLVKPGGSLKLSCA | | TGTCCTGGTTCCAGCAGAA |
| | | ASGFTFSSYAMSWVRQIPEKRLEW | | GCCCGGCAAGAGCCCCAAG |
| | | VASISRGGTTYYPDSVKGRFTISRD | | ACCCTGATCTACCGGGCCA |
| | | NVRNILYLQMSSLRSEDTAMYYCG | | ACCGGCTGGTGGACGGCGT |
| | | RYDYDGYYAMDYWGQGTSVTVSS | | GCCAAGCAGATTTTCCGGC |
| | | KPTTTPAPRPPTPAPTIASQPLSLRP | | GGAGGCAGCGGCCAGGAC |
| | | EASRPAAGGAVHTRGLDFASDKPT | | TACAGCCTGACCATCAACA |
| | | TTPAPRPPTPAPTIASQPLSLRPEAS | | GCCTGGAATACGAGGACAT |
| | | RPAAGGAVHTRGLDFASDKPTTTP | | GGGCATCTACTACTGCCTGC |
| | | APRPPTPAPTIASQPLSLRPEACRPA | | AGTACGACGAGTTCCCCTAC |
| | | AGGAVHTRGLDFACDIYIWAPLAG | | ACCTTCGGAGGCGGCACCA |
| | | TCGVLLLSLVITLYCNHRNRSKRSRG | | AGCTGGAAATGAAGGGCA |
| | | GHSDYMNMTPRRPGPTRKHYQPY | | GCACCTCCGGCAGCGGCAA |
| | | APPRDFAAYRSRVKFSRSADAPAY | | GCCTGGCAGCGGCGAGGG |
| | | QQGQNQLYNELNLGRREEYDVLD | | CAGCACCAAGGGCGAAGTG |
| | | KRRGRDPEMGGKPRRKNPQEGLY | | AAGCTGGTGGAAAGCGGC |
| | | NELQKDKMAEAYSEIGMKGERRR | | GGAGGCCTGGTGAAACCTG |
| | | GKGHDGLYQGLSTATKDTYDALH | | GCGGCAGCCTGAAGCTGAG |
| | | MQALPPR | | CTGCGCCGCCAGCGGCTTC |
| | | | | ACCTTCAGCAGCTACGCCAT |
| | | | | GAGCTGGGTCCGACAGATC |
| | | | | CCCGAGAAGCGGCTGGAAT |
| | | | | GGGTGGCCAGCATCAGCAG |
| | | | | GGGCGGCACCACCTACTAC |
| | | | | CCCGACAGCGTGAAGGGCC |
| | | | | GGTTCACCATCAGCCGGGA |
| | | | | CAACGTGCGGAACATCCTG |
| | | | | TACCTGCAGATGAGCAGCC |
| | | | | TGCGGAGCGAGGACACCGC |
| | | | | CATGTACTACTGCGGCAGA |
| | | | | TACGACTACGACGGCTACT |
| | | | | ACGCCATGGATTACTGGGG |
| | | | | CCAGGGCACCAGCGTGACC |
| | | | | GTGTCTAGCAAGCCTACCAC |
| | | | | CACCCCCGCACCTCGTCCTC |
| | | | | CAACCCCTGCACCTACGATT |
| | | | | GCCAGTCAGCCTCTTTCACT |
| | | | | GCGGCCTGAGGCCAGCAGA |
| | | | | CCAGCTGCCGGCGGTGCCG |
| | | | | TCCATACAAGAGGACTGGA |
| | | | | CTTCGCGTCCGATAAACCTA |
| | | | | CTACCACTCCAGCCCCAAGG |
| | | | | CCCCCAACCCCAGCACCGAC |
| | | | | TATCGCATCACAGCCTTTGT |
| | | | | CACTGCGTCCTGAAGCCAG |
| | | | | CCGGCCAGCTGCAGGGGG |
| | | | | GGCCGTCCACACAAGGGGA |
| | | | | CTCGACTTTGCGAGTGATA |
| | | | | AGCCCACCACCACCCCTGCC |
| | | | | CCTAGACCTCCAACCCCAGC |
| | | | | CCCTACAATCGCCAGCCAGC |
| | | | | CCCTGAGCCTGAGGCCCGA |
| | | | | AGCCTGTAGACCTGCCGCT |
| | | | | GGCGGAGCCGTGCACACCA |
| | | | | GAGGCCTGGATTTCGCCTG |
| | | | | CGACATCTACATCTGGGCCC |
| | | | | CTCTGGCCGGCACCTGTGG |
| | | | | CGTGCTGCTGCTGAGCCTG |
| | | | | GTCATCACCCTGTACTGCAA |
| | | | | CCACCGGAATAGGAGCAAG |
| | | | | CGGAGCAGAGGCGGCCAC |
| | | | | AGCGACTACATGAACATGA |
| | | | | CCCCCCGGAGGCCTGGCCC |
| | | | | CACCCGGAAGCACTACCAG |
| | | | | CCCTACGCCCCTCCCAGGGA |
| | | | | CTTCGCCGCCTACCGGAGC |
| | | | | CGGGTGAAGTTCAGCCGGA |
| | | | | GCGCCGACGCCCCTGCCTA |
| | | | | CCAGCAGGGCCAGAACCAG |
| | | | | CTGTACAACGAGCTGAACC |
| | | | | TGGGCCGGAGGGAGGAGT |
| | | | | ACGACGTGCTGGACAAGCG |
| | | | | GAGAGGCCGGGACCCTGA |
| | | | | GATGGGCGGCAAGCCCCG |
| | | | | GAGAAAGAACCCTCAGGAG |
| | | | | GGCCTGTATAACGAACTGC |
| | | | | AGAAAGACAAGATGGCCGA |
| | | | | GGCCTACAGCGAGATCGGC |
| | | | | ATGAAGGGCGAGCGGCGG |
| | | | | AGGGGCAAGGGCCACGAC |
| | | | | GGCCTGTACCAGGGCCTGA |
| | | | | GCACCGCCACCAAGGATAC |
| | | | | CTACGACGCCCTGCACATGC |
| | | | | AGGCCCTGCCCCCCAGA |
| Murine ROR1 | 601 | DIKMTQSPSSMYASLGERVTITCKA | 602 | GACATCAAGATGACCCAGA |
| (VL-VH). | | SPDINSYLSWFQQKPGKSPKTLIYR | | GCCCCAGCTCTATGTACGCC |
| CD8a(4x). | | ANRLVDGVPSRFSGGGSGQDYSLT | | AGCCTGGGCGAGCGCGTGA |
| CD28z | | INSLEYEDMGIYYCLQYDEFPYTFG | | CCATCACATGCAAGGCCAG |
| | | GGTKLEMKGSTSGSGKPGSGEGST | | CCCCGACATCAACAGCTACC |
| | | KGEVKLVESGGGLVKPGGSLKLSCA | | TGTCCTGGTTCCAGCAGAA |
| | | ASGFTFSSYAMSWVRQIPEKRLEW | | GCCCGGCAAGAGCCCCAAG |
| | | VASISRGGTTYYPDSVKGRFTISRD | | ACCCTGATCTACCGGGCCA |
| | | NVRNILYLQMSSLRSEDTAMYYCG | | ACCGGCTGGTGGACGGCGT |
| | | RYDYDGYYAMDYWGQGTSVTVSS | | GCCAAGCAGATTTTCCGGC |
| | | KPTTTPAPRPPTPAPTIASQPLSLRP | | GGAGGCAGCGGCCAGGAC |
| | | EASRPAAGGAVHTRGLDFASDKPT | | TACAGCCTGACCATCAACA |
| | | TTPAPRPPTPAPTIASQPLSLRPEAS | | GCCTGGAATACGAGGACAT |
| | | RPAAGGAVHTRGLDFASDKPTTTP | | GGGCATCTACTACTGCCTGC |
| | | APRPPTPAPTIASQPLSLRPEASRPA | | AGTACGACGAGTTCCCCTAC |
| | | AGGAVHTRGLDFASDKPTTTPAPR | | ACCTTCGGAGGCGGCACCA |
| | | PPTPAPTIASQPLSLRPEACRPAAG | | AGCTGGAAATGAAGGGCA |
| | | GAVHTRGLDFACDIYIWAPLAGTC | | GCACCTCCGGCAGCGGCAA |
| | | GVLLLSLVITLYCNHRNRSKRSRGG | | GCCTGGCAGCGGCGAGGG |
| | | HSDYMNMTPRRPGPTRKHYQPYA | | CAGCACCAAGGGCGAAGTG |
| | | PPRDFAAYRSRVKFSRSADAPAYQ | | AAGCTGGTGGAAAGCGGC |
| | | QGQNQLYNELNLGRREEYDVLDKR | | GGAGGCCTGGTGAAACCTG |
| | | RGRDPEMGGKPRRKNPQEGLYNE | | GCGGCAGCCTGAAGCTGAG |
| | | LQKDKMAEAYSEIGMKGERRRGK | | CTGCGCCGCCAGCGGCTTC |
| | | GHDGLYQGLSTATKDTYDALHMQ | | ACCTTCAGCAGCTACGCCAT |
| | | ALPPR | | GAGCTGGGTCCGACAGATC |
| | | | | CCCGAGAAGCGGCTGGAAT |
| | | | | GGGTGGCCAGCATCAGCAG |
| | | | | GGGCGGCACCACCTACTAC |
| | | | | CCCGACAGCGTGAAGGGCC |
| | | | | GGTTCACCATCAGCCGGGA |
| | | | | CAACGTGCGGAACATCCTG |
| | | | | TACCTGCAGATGAGCAGCC |
| | | | | TGCGGAGCGAGGACACCGC |
| | | | | CATGTACTACTGCGGCAGA |
| | | | | TACGACTACGACGGCTACT |
| | | | | ACGCCATGGATTACTGGGG |
| | | | | CCAGGGCACCAGCGTGACC |
| | | | | GTGTCTAGCAAGCCTACCAC |
| | | | | CACCCCCGCACCTCGTCCTC |
| | | | | CAACCCCTGCACCTACGATT |
| | | | | GCCAGTCAGCCTCTTTCACT |
| | | | | GCGGCCTGAGGCCAGCAGA |
| | | | | CCAGCTGCCGGCGGTGCCG |
| | | | | TCCATACAAGAGGACTGGA |
| | | | | CTTCGCGTCCGATAAACCTA |
| | | | | CTACCACTCCAGCCCCAAGG |
| | | | | CCCCCAACCCCAGCACCGAC |
| | | | | TATCGCATCACAGCCTTTGT |
| | | | | CACTGCGTCCTGAAGCCAG |
| | | | | CCGGCCAGCTGCAGGGGG |
| | | | | GGCCGTCCACACAAGGGGA |
| | | | | CTCGACTTTGCGAGTGATA |
| | | | | AACCTACTACAACTCCTGCC |
| | | | | CCCCGGCCTCCTACACCAGC |
| | | | | TCCTACTATCGCCTCCCAGC |
| | | | | CACTCAGTCTCAGACCCGA |
| | | | | GGCTTCTAGGCCAGCGGCC |
| | | | | GGAGGCGCGGTCCACACCC |
| | | | | GCGGGCTGGACTTTGCATC |
| | | | | CGATAAGCCCACCACCACCC |
| | | | | CTGCCCCTAGACCTCCAACC |
| | | | | CCAGCCCCTACAATCGCCAG |
| | | | | CCAGCCCCTGAGCCTGAGG |
| | | | | CCCGAAGCCTGTAGACCTG |
| | | | | CCGCTGGCGGAGCCGTGCA |
| | | | | CACCAGAGGCCTGGATTTC |
| | | | | GCCTGCGACATCTACATCTG |
| | | | | GGCCCCTCTGGCCGGCACC |
| | | | | TGTGGCGTGCTGCTGCTGA |
| | | | | GCCTGGTCATCACCCTGTAC |
| | | | | TGCAACCACCGGAATAGGA |
| | | | | GCAAGCGGAGCAGAGGCG |
| | | | | GCCACAGCGACTACATGAA |
| | | | | CATGACCCCCCGGAGGCCT |
| | | | | GGCCCCACCCGGAAGCACT |
| | | | | ACCAGCCCTACGCCCCTCCC |
| | | | | AGGGACTTCGCCGCCTACC |
| | | | | GGAGCCGGGTGAAGTTCAG |
| | | | | CCGGAGCGCCGACGCCCCT |
| | | | | GCCTACCAGCAGGGCCAGA |
| | | | | ACCAGCTGTACAACGAGCT |
| | | | | GAACCTGGGCCGGAGGGA |
| | | | | GGAGTACGACGTGCTGGAC |
| | | | | AAGCGGAGAGGCCGGGAC |
| | | | | CCTGAGATGGGCGGCAAGC |
| | | | | CCCGGAGAAAGAACCCTCA |
| | | | | GGAGGGCCTGTATAACGAA |
| | | | | CTGCAGAAAGACAAGATGG |
| | | | | CCGAGGCCTACAGCGAGAT |
| | | | | CGGCATGAAGGGCGAGCG |
| | | | | GCGGAGGGGCAAGGGCCA |
| | | | | CGACGGCCTGTACCAGGGC |
| | | | | CTGAGCACCGCCACCAAGG |
| | | | | ATACCTACGACGCCCTGCAC |
| | | | | ATGCAGGCCCTGCCCCCCA |
| | | | | GA |
| Murine | 603 | DIKMTQSPSSMYASLGERVTITCKA | 604 | GACATCAAGATGACCCAGA |
| ROR1 | | SPDINSYLSWFQQKPGKSPKTLIYR | | GCCCCAGCTCTATGTACGCC |
| (VL-VH). | | ANRLVDGVPSRFSGGGSGQDYSLT | | AGCCTGGGCGAGCGCGTGA |
| LNGFR ECD. | | INSLEYEDMGIYYCLQYDEFPYTFG | | CCATCACATGCAAGGCCAG |
| CD8TM. | | GGTKLEMKGSTSGSGKPGSGEGST | | CCCCGACATCAACAGCTACC |
| CD28z | | KGEVKLVESGGGLVKPGGSLKLSCA | | TGTCCTGGTTCCAGCAGAA |
| | | ASGFTFSSYAMSWVRQIPEKRLEW | | GCCCGGCAAGAGCCCCAAG |
| | | VASISRGGTTYYPDSVKGRFTISRD | | ACCCTGATCTACCGGGCCA |
| | | NVRNILYLQMSSLRSEDTAMYYCG | | ACCGGCTGGTGGACGGCGT |
| | | RYDYDGYYAMDYWGQGTSVTVSS | | GCCAAGCAGATTTTCCGGC |
| | | KEACPTGLYTHSGECCKACNLGEG | | GGAGGCAGCGGCCAGGAC |
| | | VAQPCGANQTVCEPCLDSVTFSDV | | TACAGCCTGACCATCAACA |
| | | VSATEPCKPCTECVGLQSMSAPCV | | GCCTGGAATACGAGGACAT |
| | | EADDAVCRCAYGYYQDETTGRCEA | | GGGCATCTACTACTGCCTGC |
| | | CRVCEAGSGLVFSCQDKCINTVCEE | | AGTACGACGAGTTCCCCTAC |
| | | CPDGTYSDEANHVDPCLPCTVCED | | ACCTTCGGAGGCGGCACCA |
| | | TERQLRECTRWADAECEEIPGRWI | | AGCTGGAAATGAAGGGCA |
| | | TRSTPPEGSDSTAPSTQEPEAPPEQ | | GCACCTCCGGCAGCGGCAA |
| | | DLIASTVAGVVTTVMGSSQPVVTR | | GCCTGGCAGCGGCGAGGG |
| | | GTTDNIYIWAPLAGTCGVLLLSLVIT | | CAGCACCAAGGGCGAAGTG |
| | | LYCNHRNRSKRSRGGHSDYMNMT | | AAGCTGGTGGAAAGCGGC |
| | | PRRPGPTRKHYQPYAPPRDFAAYR | | GGAGGCCTGGTGAAACCTG |
| | | SRVKFSRSADAPAYQQGONQLYN | | GCGGCAGCCTGAAGCTGAG |
| | | ELNLGRREEYDVLDKRRGRDPEMG | | CTGCGCCGCCAGCGGCTTC |
| | | GKPRRKNPQEGLYNELQKDKMAE | | ACCTTCAGCAGCTACGCCAT |
| | | AYSEIGMKGERRRGKGHDGLYQGL | | GAGCTGGGTCCGACAGATC |
| | | STATKDTYDALHMQALPPR | | CCCGAGAAGCGGCTGGAAT |
| | | | | GGGTGGCCAGCATCAGCAG |
| | | | | GGGCGGCACCACCTACTAC |
| | | | | CCCGACAGCGTGAAGGGCC |
| | | | | GGTTCACCATCAGCCGGGA |
| | | | | CAACGTGCGGAACATCCTG |
| | | | | TACCTGCAGATGAGCAGCC |
| | | | | TGCGGAGCGAGGACACCGC |
| | | | | CATGTACTACTGCGGCAGA |
| | | | | TACGACTACGACGGCTACT |
| | | | | ACGCCATGGATTACTGGGG |
| | | | | CCAGGGCACCAGCGTGACC |
| | | | | GTGTCTAGCAAGGAGGCAT |
| | | | | GCCCCACAGGCCTGTACAC |
| | | | | ACACAGCGGTGAGTGCTGC |
| | | | | AAAGCCTGCAACCTGGGCG |
| | | | | AGGGTGTGGCCCAGCCTTG |
| | | | | TGGAGCCAACCAGACCGTG |
| | | | | TGTGAGCCCTGCCTGGACA |
| | | | | GCGTGACGTTCTCCGACGT |
| | | | | GGTGAGCGCGACCGAGCC |
| | | | | GTGCAAGCCGTGCACCGAG |
| | | | | TGCGTGGGGCTCCAGAGCA |
| | | | | TGTCGGCGCCGTGCGTGGA |
| | | | | GGCCGACGACGCCGTGTGC |
| | | | | CGCTGCGCCTACGGCTACT |
| | | | | ACCAGGATGAGACGACTGG |
| | | | | GCGCTGCGAGGCGTGCCGC |
| | | | | GTGTGCGAGGCGGGCTCG |
| | | | | GGCCTCGTGTTCTCCTGCCA |
| | | | | GGACAAGCAGAACACCGTG |
| | | | | TGCGAGGAGTGCCCCGACG |
| | | | | GCACGTATTCCGACGAGGC |
| | | | | CAACCACGTGGACCCGTGC |
| | | | | CTGCCCTGCACCGTGTGCG |
| | | | | AGGACACCGAGCGCCAGCT |
| | | | | CCGCGAGTGCACACGCTGG |
| | | | | GCCGACGCCGAGTGCGAG |
| | | | | GAGATCCCTGGCCGTTGGA |
| | | | | TTACACGGTCCACACCCCCA |
| | | | | GAGGGCTCGGACAGCACAG |
| | | | | CCCCCAGCACCCAGGAGCC |
| | | | | TGAGGCACCTCCAGAACAA |
| | | | | GACCTCATAGCCAGCACGG |
| | | | | TGGCAGGTGTGGTGACCAC |
| | | | | AGTGATGGGCAGCTCCCAG |
| | | | | CCCGTGGTGACCCGAGGCA |
| | | | | CCACCGACAACATCTACATC |
| | | | | TGGGCCCCTCTGGCCGGCA |
| | | | | CCTGTGGCGTGCTGCTGCT |
| | | | | GAGCCTGGTCATCACCCTGT |
| | | | | ACTGCAACCACCGGAATAG |
| | | | | GAGCAAGCGGAGCAGAGG |
| | | | | CGGCCACAGCGACTACATG |
| | | | | AACATGACCCCCCGGAGGC |
| | | | | CTGGCCCCACCCGGAAGCA |
| | | | | CTACCAGCCCTACGCCCCTC |
| | | | | CCAGGGACTTCGCCGCCTA |
| | | | | CCGGAGCCGGGTGAAGTTC |
| | | | | AGCCGGAGCGCCGACGCCC |
| | | | | CTGCCTACCAGCAGGGCCA |
| | | | | GAACCAGCTGTACAACGAG |
| | | | | CTGAACCTGGGCCGGAGGG |
| | | | | AGGAGTACGACGTGCTGGA |
| | | | | CAAGCGGAGAGGCCGGGA |
| | | | | CCCTGAGATGGGCGGCAAG |
| | | | | CCCCGGAGAAAGAACCCTC |
| | | | | AGGAGGGCCTGTATAACGA |
| | | | | ACTGCAGAAAGACAAGATG |
| | | | | GCCGAGGCCTACAGCGAGA |
| | | | | TCGGCATGAAGGGCGAGCG |
| | | | | GCGGAGGGGCAAGGGCCA |
| | | | | CGACGGCCTGTACCAGGGC |
| | | | | CTGAGCACCGCCACCAAGG |
| | | | | ATACCTACGACGCCCTGCAC |
| | | | | ATGCAGGCCCTGCCCCCCA |
| | | | | GA |
| Murine | 605 | EVKLVESGGGLVKPGGSLKLSCAAS | 606 | GAAGTGAAGCTGGTGGAAA |
| ROR1 | | GFTFSSYAMSWVRQIPEKRLEWVA | | GCGGCGGAGGCCTGGTGA |
| (VH-VL). | | SISRGGTTYYPDSVKGRFTISRDNVR | | AACCTGGCGGCAGCCTGAA |
| CD8a(3x). | | NILYLQMSSLRSEDTAMYYCGRYD | | GCTGAGCTGCGCCGCCAGC |
| 41BBz | | YDGYYAMDYWGQGTSVTVSSGST | | GGCTTCACCTTCAGCAGCTA |
| | | SGSGKPGSGEGSTKGDIKMTQSPS | | CGCCATGAGCTGGGTCCGA |
| | | SMYASLGERVTITCKASPDINSYLS | | CAGATCCCCGAGAAGCGGC |
| | | WFQQKPGKSPKTLIYRANRLVDGV | | TGGAATGGGTGGCCAGCAT |
| | | PSRFSGGGSGQDYSLTINSLEYEDM | | CAGCAGGGGCGGCACCACC |
| | | GIYYCLQYDEFPYTFGGGTKLEMKK | | TACTACCCCGACAGCGTGA |
| | | PTTTPAPRPPTPAPTIASQPLSLRPE | | AGGGCCGGTTCACCATCAG |
| | | ASRPAAGGAVHTRGLDFASDKPTT | | CCGGGACAACGTGCGGAAC |
| | | TPAPRPPTPAPTIASQPLSLRPEASR | | ATCCTGTACCTGCAGATGA |
| | | PAAGGAVHTRGLDFASDKPTTTPA | | GCAGCCTGCGGAGCGAGG |
| | | PRPPTPAPTIASQPLSLRPEACRPAA | | ACACCGCCATGTACTACTGC |
| | | GGAVHTRGLDFACDIYIWAPLAGT | | GGCAGATACGACTACGACG |
| | | CGVLLLSLVITLYCNHRNKRGRKKLL | | GCTACTACGCCATGGATTAC |
| | | YIFKQPFMRPVQTTQEEDGCSCRF | | TGGGGCCAGGGCACCAGC |
| | | PEEEEGGCELRVKFSRSADAPAYQ | | GTGACCGTGTCTAGCGGCA |
| | | QGQNQLYNELNLGRREEYDVLDKR | | GCACCTCCGGCAGCGGCAA |
| | | RGRDPEMGGKPRRKNPQEGLYNE | | GCCTGGCAGCGGCGAGGG |
| | | LQKDKMAEAYSEIGMKGERRRGK | | CAGCACCAAGGGCGACATC |
| | | GHDGLYQGLSTATKDTYDALHMQ | | AAGATGACCCAGAGCCCCA |
| | | ALPPR | | GCTCTATGTACGCCAGCCTG |
| | | | | GGCGAGCGCGTGACCATCA |
| | | | | CATGCAAGGCCAGCCCCGA |
| | | | | CATCAACAGCTACCTGTCCT |
| | | | | GGTTCCAGCAGAAGCCCGG |
| | | | | CAAGAGCCCCAAGACCCTG |
| | | | | ATCTACCGGGCCAACCGGC |
| | | | | TGGTGGACGGCGTGCCAAG |
| | | | | CAGATTTTCCGGCGGAGGC |
| | | | | AGCGGCCAGGACTACAGCC |
| | | | | TGACCATCAACAGCCTGGA |
| | | | | ATACGAGGACATGGGCATC |
| | | | | TACTACTGCCTGCAGTACGA |
| | | | | CGAGTTCCCCTACACCTTCG |
| | | | | GAGGCGGCACCAAGCTGGA |
| | | | | AATGAAGAAGCCTACCACC |
| | | | | ACCCCCGCACCTCGTCCTCC |
| | | | | AACCCCTGCACCTACGATTG |
| | | | | CCAGTCAGCCTCTTTCACTG |
| | | | | CGGCCTGAGGCCAGCAGAC |
| | | | | CAGCTGCCGGCGGTGCCGT |
| | | | | CCATACAAGAGGACTGGAC |
| | | | | TTCGCGTCCGATAAACCTAC |
| | | | | TACCACTCCAGCCCCAAGGC |
| | | | | CCCCAACCCCAGCACCGACT |
| | | | | ATCGCATCACAGCCTTTGTC |
| | | | | ACTGCGTCCTGAAGCCAGC |
| | | | | CGGCCAGCTGCAGGGGGG |
| | | | | GCCGTCCACACAAGGGGAC |
| | | | | TCGACTTTGCGAGTGATAA |
| | | | | GCCCACCACCACCCCTGCCC |
| | | | | CTAGACCTCCAACCCCAGCC |
| | | | | CCTACAATCGCCAGCCAGCC |
| | | | | CCTGAGCCTGAGGCCCGAA |
| | | | | GCCTGTAGACCTGCCGCTG |
| | | | | GCGGAGCCGTGCACACCAG |
| | | | | AGGCCTGGATTTCGCCTGC |
| | | | | GACATCTACATCTGGGCCCC |
| | | | | TCTGGCCGGCACCTGTGGC |
| | | | | GTGCTGCTGCTGAGCCTGG |
| | | | | TCATCACCCTGTACTGCAAC |
| | | | | CACCGGAATAAGAGAGGCC |
| | | | | GGAAGAAACTGCTGTACAT |
| | | | | CTTCAAGCAGCCCTTCATGC |
| | | | | GGCCCGTGCAGACCACCCA |
| | | | | GGAAGAGGACGGCTGCAG |
| | | | | CTGCCGGTTCCCCGAGGAA |
| | | | | GAGGAAGGCGGCTGCGAA |
| | | | | CTGCGGGTGAAGTTCAGCC |
| | | | | GGAGCGCCGACGCCCCTGC |
| | | | | CTACCAGCAGGGCCAGAAC |
| | | | | CAGCTGTACAACGAGCTGA |
| | | | | ACCTGGGCCGGAGGGAGG |
| | | | | AGTACGACGTGCTGGACAA |
| | | | | GCGGAGAGGCCGGGACCC |
| | | | | TGAGATGGGCGGCAAGCCC |
| | | | | CGGAGAAAGAACCCTCAGG |
| | | | | AGGGCCTGTATAACGAACT |
| | | | | GCAGAAAGACAAGATGGCC |
| | | | | GAGGCCTACAGCGAGATCG |
| | | | | GCATGAAGGGCGAGCGGC |
| | | | | GGAGGGGCAAGGGCCACG |
| | | | | ACGGCCTGTACCAGGGCCT |
| | | | | GAGCACCGCCACCAAGGAT |
| | | | | ACCTACGACGCCCTGCACAT |
| | | | | GCAGGCCCTGCCCCCCAGA |
| Murine | 607 | EVKLVESGGGLVKPGGSLKLSCAAS | 608 | GAAGTGAAGCTGGTGGAAA |
| ROR1 | | GFTFSSYAMSWVRQIPEKRLEWVA | | GCGGCGGAGGCCTGGTGA |
| (VH-VL). | | SISRGGTTYYPDSVKGRFTISRDNVR | | AACCTGGCGGCAGCCTGAA |
| IgG4 Fcm. | | NILYLQMSSLRSEDTAMYYCGRYD | | GCTGAGCTGCGCCGCCAGC |
| CD8aTM. | | YDGYYAMDYWGQGTSVTVSSGST | | GGCTTCACCTTCAGCAGCTA |
| 41BBz | | SGSGKPGSGEGSTKGDIKMTQSPS | | CGCCATGAGCTGGGTCCGA |
| | | SMYASLGERVTITCKASPDINSYLS | | CAGATCCCCGAGAAGCGGC |
| | | WFQQKPGKSPKTLIYRANRLVDGV | | TGGAATGGGTGGCCAGCAT |
| | | PSRFSGGGSGQDYSLTINSLEYEDM | | CAGCAGGGGCGGCACCACC |
| | | GIYYCLQYDEFPYTFGGGTKLEMKE | | TACTACCCCGACAGCGTGA |
| | | SKYGPPCPPCPAPEFEGGPSVFLFP | | AGGGCCGGTTCACCATCAG |
| | | PKPKDTLMISRTPEVTCVVVDVSQE | | CCGGGACAACGTGCGGAAC |
| | | DPEVQFNWYVDGVEVHNAKTKPR | | ATCCTGTACCTGCAGATGA |
| | | EEQFQSTYRVVSVLTVLHQDWLNG | | GCAGCCTGCGGAGCGAGG |
| | | KEYKCKVSNKGLPSSIEKTISKAKGQ | | ACACCGCCATGTACTACTGC |
| | | PREPQVYTLPPSQEEMTKNQVSLT | | GGCAGATACGACTACGACG |
| | | CLVKGFYPSDIAVEWESNGQPENN | | GCTACTACGCCATGGATTAC |
| | | YKTTPPVLDSDGSFFLYSRLTVDKSR | | TGGGGCCAGGGCACCAGC |
| | | WQEGNVFSCSVMHEALHNHYTQ | | GTGACCGTGTCTAGCGGCA |
| | | KSLSLSLGKMIYIWAPLAGTCGVLLL | | GCACCTCCGGCAGCGGCAA |
| | | SLVITLYCNHRNKRGRKKLLYIFKQP | | GCCTGGCAGCGGCGAGGG |
| | | FMRPVQTTQEEDGCSCRFPEEEEG | | CAGCACCAAGGGCGACATC |
| | | GCELRVKFSRSADAPAYQQGQNQ | | AAGATGACCCAGAGCCCCA |
| | | LYNELNLGRREEYDVLDKRRGRDPE | | GCTCTATGTACGCCAGCCTG |
| | | MGGKPRRKNPQEGLYNELQKDK | | GGCGAGCGCGTGACCATCA |
| | | MAEAYSEIGMKGERRRGKGHDGL | | CATGCAAGGCCAGCCCCGA |
| | | YQGLSTATKDTYDALHMQALPPR | | CATCAACAGCTACCTGTCCT |
| | | | | GGTTCCAGCAGAAGCCCGG |
| | | | | CAAGAGCCCCAAGACCCTG |
| | | | | ATCTACCGGGCCAACCGGC |
| | | | | TGGTGGACGGCGTGCCAAG |
| | | | | CAGATTTTCCGGCGGAGGC |
| | | | | AGCGGCCAGGACTACAGCC |
| | | | | TGACCATCAACAGCCTGGA |
| | | | | ATACGAGGACATGGGCATC |
| | | | | TACTACTGCCTGCAGTACGA |
| | | | | CGAGTTCCCCTACACCTTCG |
| | | | | GAGGCGGCACCAAGCTGGA |
| | | | | AATGAAGGAGAGCAAGTAC |
| | | | | GGCCCTCCCTGCCCCCCTTG |
| | | | | CCCTGCCCCCGAGTTCGAG |
| | | | | GGCGGACCCAGCGTGTTCC |
| | | | | TGTTCCCCCCCAAGCCCAAG |
| | | | | GACACCCTGATGATCAGCC |
| | | | | GGACCCCCGAGGTGACCTG |
| | | | | TGTGGTGGTGGACGTGTCC |
| | | | | CAGGAGGACCCCGAGGTCC |
| | | | | AGTTCAACTGGTACGTGGA |
| | | | | CGGCGTGGAGGTGCACAAC |
| | | | | GCCAAGACCAAGCCCCGGG |
| | | | | AGGAGCAGTTCCAGAGCAC |
| | | | | CTACCGGGTGGTGTCCGTG |
| | | | | CTGACCGTGCTGCACCAGG |
| | | | | ACTGGCTGAACGGCAAGGA |
| | | | | ATACAAGTGTAAGGTGTCC |
| | | | | AACAAGGGCCTGCCCAGCA |
| | | | | GCATCGAGAAAACCATCAG |
| | | | | CAAGGCCAAGGGCCAGCCT |
| | | | | CGGGAGCCCCAGGTGTACA |
| | | | | CCCTGCCCCCTAGCCAAGA |
| | | | | GGAGATGACCAAGAATCAG |
| | | | | GTGTCCCTGACCTGCCTGGT |
| | | | | GAAGGGCTTCTACCCCAGC |
| | | | | GACATCGCCGTGGAGTGGG |
| | | | | AGAGCAACGGCCAGCCCGA |
| | | | | GAACAACTACAAGACCACC |
| | | | | CCCCCTGTGCTGGACAGCG |
| | | | | ACGGCAGCTTCTTCCTGTAC |
| | | | | AGCAGGCTGACCGTGGACA |
| | | | | AGAGCCGGTGGCAGGAGG |
| | | | | GCAACGTCTTTAGCTGCTCC |
| | | | | GTGATGCACGAGGCCCTGC |
| | | | | ACAACCACTACACCCAGAA |
| | | | | GAGCCTGTCCCTGAGCCTG |
| | | | | GGCAAGATGATCTACATCT |
| | | | | GGGCCCCTCTGGCCGGCAC |
| | | | | CTGTGGCGTGCTGCTGCTG |
| | | | | AGCCTGGTCATCACCCTGTA |
| | | | | CTGCAACCACCGGAATAAG |
| | | | | AGAGGCCGGAAGAAACTGC |
| | | | | TGTACATCTTCAAGCAGCCC |
| | | | | TTCATGCGGCCCGTGCAGA |
| | | | | CCACCCAGGAAGAGGACGG |
| | | | | CTGCAGCTGCCGGTTCCCC |
| | | | | GAGGAAGAGGAAGGCGGC |
| | | | | TGCGAACTGCGGGTGAAGT |
| | | | | TCAGCCGGAGCGCCGACGC |
| | | | | CCCTGCCTACCAGCAGGGC |
| | | | | CAGAACCAGCTGTACAACG |
| | | | | AGCTGAACCTGGGCCGGAG |
| | | | | GGAGGAGTACGACGTGCTG |
| | | | | GACAAGCGGAGAGGCCGG |
| | | | | GACCCTGAGATGGGCGGCA |
| | | | | AGCCCCGGAGAAAGAACCC |
| | | | | TCAGGAGGGCCTGTATAAC |
| | | | | GAACTGCAGAAAGACAAGA |
| | | | | TGGCCGAGGCCTACAGCGA |
| | | | | GATCGGCATGAAGGGCGA |
| | | | | GCGGCGGAGGGGCAAGGG |
| | | | | CCACGACGGCCTGTACCAG |
| | | | | GGCCTGAGCACCGCCACCA |
| | | | | AGGATACCTACGACGCCCT |
| | | | | GCACATGCAGGCCCTGCCC |
| | | | | CCCAGA |
| Murine | 609 | DVQITQSPSSLYASLGERVTITCKAS | 610 | GACGTGCAGATCACCCAGA |
| ROR1_v2 VL | | PDINSYLSWFQQKPGKSPKTLIYRA | | GCCCCAGCAGCCTGTATGC |
| | | NRLVDGVPSRFSGGGSGQDYSLTI | | CAGCCTGGGCGAGAGAGTG |
| | | NSLEYEDMGIYYCLQYDEFPYTFGG | | ACCATTACCTGCAAGGCCA |
| | | GTKLEMK | | GCCCCGACATCAACAGCTA |
| | | | | CCTGAGCTGGTTCCAGCAG |
| | | | | AAGCCCGGCAAGAGCCCCA |
| | | | | AGACCCTGATCTACCGGGC |
| | | | | CAACAGACTGGTGGATGGC |
| | | | | GTGCCCAGCAGATTCAGCG |
| | | | | GCGGAGGCTCTGGCCAGGA |
| | | | | CTACAGCCTGACCATCAACT |
| | | | | CCCTGGAATACGAGGACAT |
| | | | | GGGCATCTACTACTGCCTGC |
| | | | | AGTACGACGAGTTCCCCTAC |
| | | | | ACCTTCGGAGGCGGCACCA |
| | | | | AGCTGGAAATGAAG |
| Murine | 611 | EVKLVESGGGLVKPGGSLKLSCAAS | 612 | GAAGTGAAGCTGGTGGAAT |
| ROR1_v2 VH | | GFTFSSYAMSWVRQIPEKRLEWVA | | CTGGCGGCGGACTCGTGAA |
| | | SISRGGTTYYPDSVKGRFTISRDNVR | | GCCTGGCGGCTCTCTGAAG |
| | | NILYLQMSSLRSEDTAMYYCGRYD | | CTGTCTTGTGCCGCCAGCG |
| | | YDGYYAMDYWGQGTSVTVSS | | GCTTCACCTTCAGCAGCTAC |
| | | | | GCCATGAGCTGGGTGCGGC |
| | | | | AGATCCCCGAGAAGCGGCT |
| | | | | GGAATGGGTGGCCAGCATC |
| | | | | AGCAGAGGCGGAACCACCT |
| | | | | ACTACCCCGACTCTGTGAAG |
| | | | | GGCCGGTTCACCATCAGCC |
| | | | | GGGACAACGTGCGGAACAT |
| | | | | CCTGTACCTGCAGATGAGC |
| | | | | AGCCTGCGGAGCGAGGACA |
| | | | | CCGCCATGTACTACTGTGGC |
| | | | | AGATACGACTACGACGGCT |
| | | | | ACTATGCCATGGATTACTG |
| | | | | GGGCCAGGGCACCAGCGT |
| | | | | GACCGTGTCATCT |
| Murine | 613 | DVQITQSPSSLYASLGERVTITCKAS | 614 | GACGTGCAGATCACCCAGA |
| ROR1_v2 | | PDINSYLSWFQQKPGKSPKTLIYRA | | GCCCCAGCAGCCTGTATGC |
| (VL-VH). | | NRLVDGVPSRFSGGGSGQDYSLTI | | CAGCCTGGGCGAGAGAGTG |
| CD8a(3x). | | NSLEYEDMGIYYCLQYDEFPYTFGG | | ACCATTACCTGCAAGGCCA |
| CD28z | | GTKLEMKGSTSGSGKPGSGEGSTK | | GCCCCGACATCAACAGCTA |
| | | GEVKLVESGGGLVKPGGSLKLSCAA | | CCTGAGCTGGTTCCAGCAG |
| | | SGFTFSSYAMSWVRQIPEKRLEWV | | AAGCCCGGCAAGAGCCCCA |
| | | ASISRGGTTYYPDSVKGRFTISRDN | | AGACCCTGATCTACCGGGC |
| | | VRNILYLQMSSLRSEDTAMYYCGR | | CAACAGACTGGTGGATGGC |
| | | YDYDGYYAMDYWGQGTSVTVSSK | | GTGCCCAGCAGATTCAGCG |
| | | PTTTPAPRPPTPAPTIASQPLSLRPE | | GCGGAGGCTCTGGCCAGGA |
| | | ASRPAAGGAVHTRGLDFASDKPTT | | CTACAGCCTGACCATCAACT |
| | | TPAPRPPTPAPTIASQPLSLRPEASR | | CCCTGGAATACGAGGACAT |
| | | PAAGGAVHTRGLDFASDKPTTTPA | | GGGCATCTACTACTGCCTGC |
| | | PRPPTPAPTIASQPLSLRPEACRPAA | | AGTACGACGAGTTCCCCTAC |
| | | GGAVHTRGLDFACDIYIWAPLAGT | | ACCTTCGGAGGCGGCACCA |
| | | CGVLLLSLVITLYCNHRNRSKRSRG | | AGCTGGAAATGAAGGGCA |
| | | GHSDYMNMTPRRPGPTRKHYQPY | | GCACAAGCGGCAGCGGCAA |
| | | APPRDFAAYRSRVKFSRSADAPAY | | GCCTGGATCTGGCGAGGGA |
| | | QQGQNQLYNELNLGRREEYDVLD | | AGCACCAAGGGCGAAGTGA |
| | | KRRGRDPEMGGKPRRKNPQEGLY | | AGCTGGTGGAATCTGGCGG |
| | | NELQKDKMAEAYSEIGMKGERRR | | CGGACTCGTGAAGCCTGGC |
| | | GKGHDGLYQGLSTATKDTYDALH | | GGCTCTCTGAAGCTGTCTTG |
| | | MQALPPR | | TGCCGCCAGCGGCTTCACCT |
| | | | | TCAGCAGCTACGCCATGAG |
| | | | | CTGGGTGCGGCAGATCCCC |
| | | | | GAGAAGCGGCTGGAATGG |
| | | | | GTGGCCAGCATCAGCAGAG |
| | | | | GCGGAACCACCTACTACCCC |
| | | | | GACTCTGTGAAGGGCCGGT |
| | | | | TCACCATCAGCCGGGACAA |
| | | | | CGTGCGGAACATCCTGTAC |
| | | | | CTGCAGATGAGCAGCCTGC |
| | | | | GGAGCGAGGACACCGCCAT |
| | | | | GTACTACTGTGGCAGATAC |
| | | | | GACTACGACGGCTACTATG |
| | | | | CCATGGATTACTGGGGCCA |
| | | | | GGGCACCAGCGTGACCGTG |
| | | | | TCATCTAAGCCTACCACCAC |
| | | | | CCCCGCACCTCGTCCTCCAA |
| | | | | CCCCTGCACCTACGATTGCC |
| | | | | AGTCAGCCTCTTTCACTGCG |
| | | | | GCCTGAGGCCAGCAGACCA |
| | | | | GCTGCCGGCGGTGCCGTCC |
| | | | | ATACAAGAGGACTGGACTT |
| | | | | CGCGTCCGATAAACCTACTA |
| | | | | CCACTCCAGCCCCAAGGCCC |
| | | | | CCAACCCCAGCACCGACTAT |
| | | | | CGCATCACAGCCTTTGTCAC |
| | | | | TGCGTCCTGAAGCCAGCCG |
| | | | | GCCAGCTGCAGGGGGGGC |
| | | | | CGTCCACACAAGGGGACTC |
| | | | | GACTTTGCGAGTGATAAGC |
| | | | | CCACCACCACCCCTGCCCCT |
| | | | | AGACCTCCAACCCCAGCCCC |
| | | | | TACAATCGCCAGCCAGCCCC |
| | | | | TGAGCCTGAGGCCCGAAGC |
| | | | | CTGTAGACCTGCCGCTGGC |
| | | | | GGAGCCGTGCACACCAGAG |
| | | | | GCCTGGATTTCGCCTGCGA |
| | | | | CATCTACATCTGGGCCCCTC |
| | | | | TGGCCGGCACCTGTGGCGT |
| | | | | GCTGCTGCTGAGCCTGGTC |
| | | | | ATCACCCTGTACTGCAACCA |
| | | | | CCGGAATAGGAGCAAGCG |
| | | | | GAGCAGAGGCGGCCACAG |
| | | | | CGACTACATGAACATGACC |
| | | | | CCCCGGAGGCCTGGCCCCA |
| | | | | CCCGGAAGCACTACCAGCC |
| | | | | CTACGCCCCTCCCAGGGACT |
| | | | | TCGCCGCCTACCGGAGCCG |
| | | | | GGTGAAGTTCAGCCGGAGC |
| | | | | GCCGACGCCCCTGCCTACCA |
| | | | | GCAGGGCCAGAACCAGCTG |
| | | | | TACAACGAGCTGAACCTGG |
| | | | | GCCGGAGGGAGGAGTACG |
| | | | | ACGTGCTGGACAAGCGGAG |
| | | | | AGGCCGGGACCCTGAGATG |
| | | | | GGCGGCAAGCCCCGGAGA |
| | | | | AAGAACCCTCAGGAGGGCC |
| | | | | TGTATAACGAACTGCAGAA |
| | | | | AGACAAGATGGCCGAGGCC |
| | | | | TACAGCGAGATCGGCATGA |
| | | | | AGGGCGAGCGGCGGAGGG |
| | | | | GCAAGGGCCACGACGGCCT |
| | | | | GTACCAGGGCCTGAGCACC |
| | | | | GCCACCAAGGATACCTACG |
| | | | | ACGCCCTGCACATGCAGGC |
| | | | | CCTGCCCCCCAGA |
| hROR1 | 615 | EVQLVESGGGLVQPGGSLRLSCAT | 616 | GAAGTGCAGCTGGTGGAGT |
| (VH-VL)_ | | SGFTFSSYAMSWMRQAPGKGLE | | CTGGCGGCGGTCTGGTGCA |
| 14. | | WVASISRGGTTYYADSVKGRFTISV | | GCCCGGCGGCTCTCTGCGC |
| CD8a(3x). | | DKSKNTLYLQMNSLRAEDTAVYYC | | CTCTCCTGTGCCACCTCTGG |
| CD28z | | GRYDYDGYYAMDYWGQGTLVTVS | | TTTTACATTCTCCTCCTACGC |
| | | SGGGGSGGGGSGGGGSDIQMTQ | | TATGTCCTGGATGCGGCAA |
| | | SPSSLSASVGDRVTITCKASPDINSY | | GCCCCCGGCAAGGGCCTAG |
| | | LNWYQQKPGKAPKLLIYRANRLVD | | AGTGGGTCGCCTCAATCAG |
| | | GVPSRFSGSGSGTDYTLTISSLQPED | | CAGGGGCGGGACGACTTAT |
| | | FATYYCLQYDEFPYTFGAGTKVEIKK | | TATGCCGATTCAGTTAAGG |
| | | PTTTPAPRPPTPAPTIASQPLSLRPE | | GGAGATTCACAATTTCCGT |
| | | ASRPAAGGAVHTRGLDFASDKPTT | | GGATAAATCCAAGAATACC |
| | | TPAPRPPTPAPTIASQPLSLRPEASR | | TTATACCTCCAGATGAACTC |
| | | PAAGGAVHTRGLDFASDKPTTTPA | | TCTGCGGGCCGAAGATACG |
| | | PRPPTPAPTIASQPLSLRPEACRPAA | | GCCGTATATTATTGTGGGA |
| | | GGAVHTRGLDFACDIYIWAPLAGT | | GGTATGACTACGACGGATA |
| | | CGVLLLSLVITLYCNHRNRSKRSRG | | TTACGCCATGGATTATTGG |
| | | GHSDYMNMTPRRPGPTRKHYQPY | | GGGCAGGGGACACTTGTTA |
| | | APPRDFAAYRSRVKFSRSADAPAY | | CAGTGAGTTCCGGTGGTGG |
| | | QQGQNQLYNELNLGRREEYDVLD | | GGGGTCTGGAGGCGGGGG |
| | | KRRGRDPEMGGKPRRKNPQEGLY | | CAGTGGAGGCGGAGGGTC |
| | | NELQKDKMAEAYSEIGMKGERRR | | TGATATACAGATGACACAG |
| | | GKGHDGLYQGLSTATKDTYDALH | | AGCCCTTCAAGTTTATCTGC |
| | | MQALPPR | | AAGCGTCGGCGATCGTGTT |
| | | | | ACAATAACTTGCAAGGCAT |
| | | | | CTCCCGACATCAATTCCTAC |
| | | | | CTCAACTGGTATCAGCAGA |
| | | | | AGCCTGGGAAGGCTCCTAA |
| | | | | GCTGCTTATTTACAGAGCAA |
| | | | | ATCGCCTGGTGGACGGCGT |
| | | | | GCCCAGTCGGTTTTCCGGG |
| | | | | TCTGGGAGCGGAACGGATT |
| | | | | ACACACTGACCATCTCAAGC |
| | | | | CTGCAACCCGAAGACTTCG |
| | | | | CTACATATTACTGCCTTCAG |
| | | | | TATGATGAGTTCCCATATAC |
| | | | | CTTCGGCGCTGGGACCAAG |
| | | | | GTGGAGATAAAGAAGCCTA |
| | | | | CCACCACCCCCGCACCTCGT |
| | | | | CCTCCAACCCCTGCACCTAC |
| | | | | GATTGCCAGTCAGCCTCTTT |
| | | | | CACTGCGGCCTGAGGCCAG |
| | | | | CAGACCAGCTGCCGGCGGT |
| | | | | GCCGTCCATACAAGAGGAC |
| | | | | TGGACTTCGCGTCCGATAA |
| | | | | ACCTACTACCACTCCAGCCC |
| | | | | CAAGGCCCCCAACCCCAGC |
| | | | | ACCGACTATCGCATCACAGC |
| | | | | CTTTGTCACTGCGTCCTGAA |
| | | | | GCCAGCCGGCCAGCTGCAG |
| | | | | GGGGGGCCGTCCACACAAG |
| | | | | GGGACTCGACTTTGCGAGT |
| | | | | GATAAGCCCACCACCACCCC |
| | | | | TGCCCCTAGACCTCCAACCC |
| | | | | CAGCCCCTACAATCGCCAGC |
| | | | | CAGCCCCTGAGCCTGAGGC |
| | | | | CCGAAGCCTGTAGACCTGC |
| | | | | CGCTGGCGGAGCCGTGCAC |
| | | | | ACCAGAGGCCTGGATTTCG |
| | | | | CCTGCGACATCTACATCTGG |
| | | | | GCCCCTCTGGCCGGCACCT |
| | | | | GTGGCGTGCTGCTGCTGAG |
| | | | | CCTGGTCATCACCCTGTACT |
| | | | | GCAACCACCGGAATAGGAG |
| | | | | CAAGCGGAGCAGAGGCGG |
| | | | | CCACAGCGACTACATGAAC |
| | | | | ATGACCCCCCGGAGGCCTG |
| | | | | GCCCCACCCGGAAGCACTA |
| | | | | CCAGCCCTACGCCCCTCCCA |
| | | | | GGGACTTCGCCGCCTACCG |
| | | | | GAGCCGGGTGAAGTTCAGC |
| | | | | CGGAGCGCCGACGCCCCTG |
| | | | | CCTACCAGCAGGGCCAGAA |
| | | | | CCAGCTGTACAACGAGCTG |
| | | | | AACCTGGGCCGGAGGGAG |
| | | | | GAGTACGACGTGCTGGACA |
| | | | | AGCGGAGAGGCCGGGACC |
| | | | | CTGAGATGGGCGGCAAGCC |
| | | | | CCGGAGAAAGAACCCTCAG |
| | | | | GAGGGCCTGTATAACGAAC |
| | | | | TGCAGAAAGACAAGATGGC |
| | | | | CGAGGCCTACAGCGAGATC |
| | | | | GGCATGAAGGGCGAGCGG |
| | | | | CGGAGGGGCAAGGGCCAC |
| | | | | GACGGCCTGTACCAGGGCC |
| | | | | TGAGCACCGCCACCAAGGA |
| | | | | TACCTACGACGCCCTGCACA |
| | | | | TGCAGGCCCTGCCCCCCAG |
| | | | | A |
| hROR1 | 617 | DIQMTQSPSSLSASVGDRVTITCKA | 618 | GATATTCAGATGACCCAGTC |
| (VL-VH)_ | | SPDINSYLSWYQQKPGKAPKLLIYR | | ACCTTCGAGTCTGAGCGCA |
| 05. | | ANRLVDGVPSRFSGSGSGTDFTLTI | | TCCGTGGGCGACAGAGTGA |
| CD8a(3x). | | SSLQPEDIATYYCLQYDEFPYTFGQ | | CCATTACCTGTAAGGCCAGC |
| CD28z | | GTKLEIKGGGGSGGGGSGGGGSEV | | CCGGACATTAACAGCTACCT |
| | | QLVESGGGLVQPGGSLRLSCAASG | | ATCGTGGTATCAGCAAAAG |
| | | FTFSSYAMSWVRQAPGKGLEWVS | | CCTGGTAAGGCCCCTAAACT |
| | | SISRGGTTYYPDSVKGRFTISRDNSK | | CCTTATCTACAGGGCTAATA |
| | | NTLYLOMNSLRAEDTAVYYCGRYD | | GGTTGGTAGACGGGGTGCC |
| | | TAGCCGGTTCTCTGGTTCCG | | GCAGCGGTACGGACTTTAC |
| | | YDGYYAMDYWGQGTLVTVSSKPT | | TCTGACCATAAGCTCTCTGC |
| | | TTPAPRPPTPAPTIASQPLSLRPEAS | | AACCAGAAGACATCGCAAC |
| | | RPAAGGAVHTRGLDFASDKPTTTP | | ATACTACTGTTTACAATACG |
| | | APRPPTPAPTIASQPLSLRPEASRPA | | ACGAATTTCCTTATACCTTT |
| | | AGGAVHTRGLDFASDKPTTTPAPR | | GGCCAGGGGACCAAGTTAG |
| | | PPTPAPTIASQPLSLRPEACRPAAG | | AGATCAAGGGGGGCGGCG |
| | | GAVHTRGLDFACDIYIWAPLAGTC | | GAAGTGGTGGAGGGGGAA |
| | | GVLLLSLVITLYCNHRNRSKRSRGG | | GTGGTGGAGGAGGAAGCG |
| | | HSDYMNMTPRRPGPTRKHYQPYA | | AAGTGCAACTGGTCGAGTC |
| | | PPRDFAAYRSRVKFSRSADAPAYQ | | TGGGGGCGGCCTTGTGCAA |
| | | QGQNQLYNELNLGRREEYDVLDKR | | CCTGGAGGCAGCCTTCGAC |
| | | RGRDPEMGGKPRRKNPQEGLYNE | | TCAGTTGCGCCGCGTCTGG |
| | | LQKDKMAEAYSEIGMKGERRRGK | | TTTTACCTTCTCCTCTTACGC |
| | | GHDGLYQGLSTATKDTYDALHMQ | | GATGAGCTGGGTTCGCCAG |
| | | ALPPR | | GCCCCCGGCAAGGGACTTG |
| | | | | AGTGGGTTAGTTCGATCTCC |
| | | | | CGCGGAGGCACCACATATT |
| | | | | ATCCTGACTCGGTTAAGGG |
| | | | | ACGCTTCACTATCTCTAGGG |
| | | | | ACAATTCAAAGAACACACT |
| | | | | GTATCTCCAAATGAACTCCT |
| | | | | TGCGGGCCGAGGACACTGC |
| | | | | TGTGTATTATTGCGGACGAT |
| | | | | ACGACTACGATGGGTATTA |
| | | | | CGCCATGGATTACTGGGGG |
| | | | | CAAGGTACACTGGTCACTG |
| | | | | TGAGTTCGAAGCCTACCACC |
| | | | | ACCCCCGCACCTCGTCCTCC |
| | | | | AACCCCTGCACCTACGATTG |
| | | | | CCAGTCAGCCTCTTTCACTG |
| | | | | CGGCCTGAGGCCAGCAGAC |
| | | | | CAGCTGCCGGCGGTGCCGT |
| | | | | CCATACAAGAGGACTGGAC |
| | | | | TTCGCGTCCGATAAACCTAC |
| | | | | TACCACTCCAGCCCCAAGGC |
| | | | | CCCCAACCCCAGCACCGACT |
| | | | | ATCGCATCACAGCCTTTGTC |
| | | | | ACTGCGTCCTGAAGCCAGC |
| | | | | CGGCCAGCTGCAGGGGGG |
| | | | | GCCGTCCACACAAGGGGAC |
| | | | | TCGACTTTGCGAGTGATAA |
| | | | | GCCCACCACCACCCCTGCCC |
| | | | | CTAGACCTCCAACCCCAGCC |
| | | | | CCTACAATCGCCAGCCAGCC |
| | | | | CCTGAGCCTGAGGCCCGAA |
| | | | | GCCTGTAGACCTGCCGCTG |
| | | | | GCGGAGCCGTGCACACCAG |
| | | | | AGGCCTGGATTTCGCCTGC |
| | | | | GACATCTACATCTGGGCCCC |
| | | | | TCTGGCCGGCACCTGTGGC |
| | | | | GTGCTGCTGCTGAGCCTGG |
| | | | | TCATCACCCTGTACTGCAAC |
| | | | | CACCGGAATAGGAGCAAGC |
| | | | | GGAGCAGAGGCGGCCACA |
| | | | | GCGACTACATGAACATGAC |
| | | | | CCCCCGGAGGCCTGGCCCC |
| | | | | ACCCGGAAGCACTACCAGC |
| | | | | CCTACGCCCCTCCCAGGGAC |
| | | | | TTCGCCGCCTACCGGAGCC |
| | | | | GGGTGAAGTTCAGCCGGAG |
| | | | | CGCCGACGCCCCTGCCTACC |
| | | | | AGCAGGGCCAGAACCAGCT |
| | | | | GTACAACGAGCTGAACCTG |
| | | | | GGCCGGAGGGAGGAGTAC |
| | | | | GACGTGCTGGACAAGCGGA |
| | | | | GAGGCCGGGACCCTGAGAT |
| | | | | GGGCGGCAAGCCCCGGAG |
| | | | | AAAGAACCCTCAGGAGGGC |
| | | | | CTGTATAACGAACTGCAGA |
| | | | | AAGACAAGATGGCCGAGGC |
| | | | | CTACAGCGAGATCGGCATG |
| | | | | AAGGGCGAGCGGCGGAGG |
| | | | | GGCAAGGGCCACGACGGCC |
| | | | | TGTACCAGGGCCTGAGCAC |
| | | | | CGCCACCAAGGATACCTAC |
| | | | | GACGCCCTGCACATGCAGG |
| | | | | CCCTGCCCCCCAGATGA |
| hROR1 | 619 | EVQLVESGGGLVQPGGSLRLSCAA | 620 | GAGGTTCAACTTGTGGAAT |
| (VH-VL)_ | | SGFTFSSYAMSWVRQAPGKGLEW | | CCGGCGGCGGGTTAGTCCA |
| 14-3. | | VASISRGGTTYYADSVKGRFTISRD | | GCCCGGCGGGAGCTTGCGG |
| CD8a(3x). | | NSKNTLYLQMNSLRAEDTAVYYCG | | CTGTCCTGCGCCGCCTCTGG |
| CD28z | | RYDYDGYYAMDYWGQGTLVTVSS | | ATTCACTTTTAGCTCCTATG |
| | | GGGGSGGGGSGGGGSDIQMTQS | | CTATGTCTTGGGTAAGGCA |
| | | PSSLSASVGDRVTITCKASPDINSYL | | GGCCCCTGGTAAAGGACTA |
| | | NWYQQKPGKAPKLLIYRANRLVDG | | GAGTGGGTGGCCTCGATCT |
| | | VPSRFSGSGSGTDFTLTISSLQPEDI | | CCCGTGGTGGCACTACATA |
| | | ATYYCLQYDEFPYTFGGGTKVEIKK | | CTACGCCGACTCCGTTAAAG |
| | | PTTTPAPRPPTPAPTIASQPLSLRPE | | GCCGGTTTACCATCTCCCGT |
| | | ASRPAAGGAVHTRGLDFASDKPTT | | GACAACTCTAAAAATACTTT |
| | | TPAPRPPTPAPTIASQPLSLRPEASR | | GTACCTGCAAATGAACTCCC |
| | | PAAGGAVHTRGLDFASDKPTTTPA | | TGCGGGCAGAAGACACAGC |
| | | PRPPTPAPTIASQPLSLRPEACRPAA | | CGTGTACTATTGCGGGCGT |
| | | GGAVHTRGLDFACDIYIWAPLAGT | | TACGATTACGACGGATATTA |
| | | CGVLLLSLVITLYCNHRNRSKRSRG | | CGCAATGGACTACTGGGGC |
| | | GHSDYMNMTPRRPGPTRKHYQPY | | CAGGGCACACTGGTCACCG |
| | | APPRDFAAYRSRVKFSRSADAPAY | | TGAGCAGCGGGGGCGGAG |
| | | QQGQNQLYNELNLGRREEYDVLD | | GAAGTGGAGGAGGCGGTA |
| | | KRRGRDPEMGGKPRRKNPQEGLY | | GTGGTGGGGGAGGAAGCG |
| | | NELQKDKMAEAYSEIGMKGERRR | | ATATACAAATGACTCAGTCC |
| | | GKGHDGLYQGLSTATKDTYDALH | | CCTAGTAGCCTTAGTGCTAG |
| | | MQALPPR | | TGTGGGAGACAGAGTGACC |
| | | | | ATCACCTGCAAAGCATCTCC |
| | | | | TGATATCAATTCCTACCTTA |
| | | | | ACTGGTATCAACAGAAGCC |
| | | | | TGGCAAAGCTCCAAAGCTC |
| | | | | CTGATTTATCGCGCGAACA |
| | | | | GATTGGTCGATGGGGTCCC |
| | | | | TTCCAGATTCAGCGGCTCA |
| | | | | GGGTCAGGGACCGATTTCA |
| | | | | CCCTCACAATTAGTTCACTT |
| | | | | CAGCCCGAGGACATCGCCA |
| | | | | CGTATTATTGCCTTCAGTAC |
| | | | | GATGAGTTCCCTTACACCTT |
| | | | | TGGCGGGGGAACTAAAGTC |
| | | | | GAAATTAAGAAGCCTACCA |
| | | | | CCACCCCCGCACCTCGTCCT |
| | | | | CCAACCCCTGCACCTACGAT |
| | | | | TGCCAGTCAGCCTCTTTCAC |
| | | | | TGCGGCCTGAGGCCAGCAG |
| | | | | ACCAGCTGCCGGCGGTGCC |
| | | | | GTCCATACAAGAGGACTGG |
| | | | | ACTTCGCGTCCGATAAACCT |
| | | | | ACTACCACTCCAGCCCCAAG |
| | | | | GCCCCCAACCCCAGCACCG |
| | | | | ACTATCGCATCACAGCCTTT |
| | | | | GTCACTGCGTCCTGAAGCC |
| | | | | AGCCGGCCAGCTGCAGGG |
| | | | | GGGGCCGTCCACACAAGGG |
| | | | | GACTCGACTTTGCGAGTGA |
| | | | | TAAGCCCACCACCACCCCTG |
| | | | | CCCCTAGACCTCCAACCCCA |
| | | | | GCCCCTACAATCGCCAGCCA |
| | | | | GCCCCTGAGCCTGAGGCCC |
| | | | | GAAGCCTGTAGACCTGCCG |
| | | | | CTGGCGGAGCCGTGCACAC |
| | | | | CAGAGGCCTGGATTTCGCC |
| | | | | TGCGACATCTACATCTGGG |
| | | | | CCCCTCTGGCCGGCACCTGT |
| | | | | GGCGTGCTGCTGCTGAGCC |
| | | | | TGGTCATCACCCTGTACTGC |
| | | | | AACCACCGGAATAGGAGCA |
| | | | | AGCGGAGCAGAGGCGGCC |
| | | | | ACAGCGACTACATGAACAT |
| | | | | GACCCCCCGGAGGCCTGGC |
| | | | | CCCACCCGGAAGCACTACC |
| | | | | AGCCCTACGCCCCTCCCAGG |
| | | | | GACTTCGCCGCCTACCGGA |
| | | | | GCCGGGTGAAGTTCAGCCG |
| | | | | GAGCGCCGACGCCCCTGCC |
| | | | | TACCAGCAGGGCCAGAACC |
| | | | | AGCTGTACAACGAGCTGAA |
| | | | | CCTGGGCCGGAGGGAGGA |
| | | | | GTACGACGTGCTGGACAAG |
| | | | | CGGAGAGGCCGGGACCCT |
| | | | | GAGATGGGCGGCAAGCCCC |
| | | | | GGAGAAAGAACCCTCAGGA |
| | | | | GGGCCTGTATAACGAACTG |
| | | | | CAGAAAGACAAGATGGCCG |
| | | | | AGGCCTACAGCGAGATCGG |
| | | | | CATGAAGGGCGAGCGGCG |
| | | | | GAGGGGCAAGGGCCACGA |
| | | | | CGGCCTGTACCAGGGCCTG |
| | | | | AGCACCGCCACCAAGGATA |
| | | | | CCTACGACGCCCTGCACATG |
| | | | | CAGGCCCTGCCCCCCAGA |
| hROR1 | 621 | EVQLVESGGGLVQPGGSLRLSCAA | 622 | GAAGTGCAGCTTGTGGAGT |
| (VH-VL)_ | | SGFTFSSYAMSWVRQAPGKGLEW | | CAGGAGGAGGGCTAGTTCA |
| 14-4. | | VASISRGGTTYYPDSVKGRFTISRD | | GCCAGGCGGCTCTCTGAGA |
| CD8a(3x). | | NVRNILYLQMSSLRSEDTAMYYCG | | CTATCTTGTGCTGCCTCCGG |
| CD28z | | RYDYDGYYAMDYWGQGTLVTVSS | | CTTCACATTTAGCTCTTATG |
| | | GGGGSGGGGSGGGGSDIQMTQS | | CAATGTCCTGGGTCCGCCA |
| | | PSSLSASVGDRVTITCKASPDINSYL | | GGCCCCTGGTAAAGGCCTG |
| | | NWYQQKPGKAPKLLIYRANRLVDG | | GAATGGGTTGCTTCTATCTC |
| | | VPSRFSGSGSGTDYTLTISSLQPEDF | | TAGAGGCGGAACCACTTAC |
| | | ATYYCLQYDEFPYTFGAGTKVEIKK | | TACCCTGATTCAGTGAAGG |
| | | PTTTPAPRPPTPAPTIASQPLSLRPE | | GGAGATTCACAATTAGTAG |
| | | ASRPAAGGAVHTRGLDFASDKPTT | | GGACAACGTGCGGAACATC |
| | | TPAPRPPTPAPTIASQPLSLRPEASR | | CTCTACCTACAGATGTCAAG |
| | | PAAGGAVHTRGLDFASDKPTTTPA | | TTTACGCAGTGAGGACACT |
| | | PRPPTPAPTIASQPLSLRPEACRPAA | | GCGATGTATTACTGCGGTC |
| | | GGAVHTRGLDFACDIYIWAPLAGT | | GATACGATTATGATGGATA |
| | | CGVLLLSLVITLYCNHRNRSKRSRG | | TTATGCAATGGATTATTGG |
| | | GHSDYMNMTPRRPGPTRKHYQPY | | GGCCAGGGCACTCTGGTCA |
| | | APPRDFAAYRSRVKFSRSADAPAY | | CAGTATCTTCCGGCGGCGG |
| | | QQGQNQLYNELNLGRREEYDVLD | | TGGTTCTGGCGGTGGTGGA |
| | | KRRGRDPEMGGKPRRKNPQEGLY | | AGCGGAGGGGGGGGGTCC |
| | | NELQKDKMAEAYSEIGMKGERRR | | GACATCCAGATGACCCAAT |
| | | GKGHDGLYQGLSTATKDTYDALH | | CACCATCGAGTCTTAGTGCA |
| | | MQALPPR | | TCCGTTGGGGATAGAGTGA |
| | | | | CAATCACTTGTAAGGCATCC |
| | | | | CCGGACATCAACTCATATCT |
| | | | | TAATTGGTATCAGCAAAAG |
| | | | | CCGGGCAAGGCCCCTAAGC |
| | | | | TCCTGATTTATAGGGCCAAC |
| | | | | CGCCTTGTGGATGGAGTCC |
| | | | | CCTCCCGCTTTAGTGGAAGC |
| | | | | GGCTCTGGCACAGACTACA |
| | | | | CCCTGACTATCAGCTCCTTG |
| | | | | CAGCCTGAGGATTTTGCTAC |
| | | | | CTACTACTGTCTTCAGTACG |
| | | | | ATGAATTTCCATACACTTTC |
| | | | | GGTGCTGGGACAAAAGTGG |
| | | | | AGATCAAAAAGCCTACCAC |
| | | | | CACCCCCGCACCTCGTCCTC |
| | | | | CAACCCCTGCACCTACGATT |
| | | | | GCCAGTCAGCCTCTTTCACT |
| | | | | GCGGCCTGAGGCCAGCAGA |
| | | | | CCAGCTGCCGGCGGTGCCG |
| | | | | TCCATACAAGAGGACTGGA |
| | | | | CTTCGCGTCCGATAAACCTA |
| | | | | CTACCACTCCAGCCCCAAGG |
| | | | | CCCCCAACCCCAGCACCGAC |
| | | | | TATCGCATCACAGCCTTTGT |
| | | | | CACTGCGTCCTGAAGCCAG |
| | | | | CCGGCCAGCTGCAGGGGG |
| | | | | GGCCGTCCACACAAGGGGA |
| | | | | CTCGACTTTGCGAGTGATA |
| | | | | AGCCCACCACCACCCCTGCC |
| | | | | CCTAGACCTCCAACCCCAGC |
| | | | | CCCTACAATCGCCAGCCAGC |
| | | | | CCCTGAGCCTGAGGCCCGA |
| | | | | AGCCTGTAGACCTGCCGCT |
| | | | | GGCGGAGCCGTGCACACCA |
| | | | | GAGGCCTGGATTTCGCCTG |
| | | | | CGACATCTACATCTGGGCCC |
| | | | | CTCTGGCCGGCACCTGTGG |
| | | | | CGTGCTGCTGCTGAGCCTG |
| | | | | GTCATCACCCTGTACTGCAA |
| | | | | CCACCGGAATAGGAGCAAG |
| | | | | CGGAGCAGAGGCGGCCAC |
| | | | | AGCGACTACATGAACATGA |
| | | | | CCCCCCGGAGGCCTGGCCC |
| | | | | CACCCGGAAGCACTACCAG |
| | | | | CCCTACGCCCCTCCCAGGGA |
| | | | | CTTCGCCGCCTACCGGAGC |
| | | | | CGGGTGAAGTTCAGCCGGA |
| | | | | GCGCCGACGCCCCTGCCTA |
| | | | | CCAGCAGGGCCAGAACCAG |
| | | | | CTGTACAACGAGCTGAACC |
| | | | | TGGGCCGGAGGGAGGAGT |
| | | | | ACGACGTGCTGGACAAGCG |
| | | | | GAGAGGCCGGGACCCTGA |
| | | | | GATGGGCGGCAAGCCCCG |
| | | | | GAGAAAGAACCCTCAGGAG |
| | | | | GGCCTGTATAACGAACTGC |
| | | | | AGAAAGACAAGATGGCCGA |
| | | | | GGCCTACAGCGAGATCGGC |
| | | | | ATGAAGGGCGAGCGGCGG |
| | | | | AGGGGCAAGGGCCACGAC |
| | | | | GGCCTGTACCAGGGCCTGA |
| | | | | GCACCGCCACCAAGGATAC |
| | | | | CTACGACGCCCTGCACATGC |
| | | | | AGGCCCTGCCCCCCAGA |
| hROR1 | 623 | EVQLVESGGGLVQPGGSLRLSCAA | 624 | GAAGTGCAACTGGTCGAGT |
| (VH_5-VL_14). | | SGFTFSSYAMSWVRQAPGKGLEW | | CTGGGGGCGGCCTTGTGCA |
| CD8a(3x). | | VSSISRGGTTYYPDSVKGRFTISRDN | | ACCTGGAGGCAGCCTTCGA |
| CD28z | | SKNTLYLQMNSLRAEDTAVYYCGR | | CTCAGTTGCGCCGCGTCTG |
| | | YDYDGYYAMDYWGQGTLVTVSSG | | GTTTTACCTTCTCCTCTTACG |
| | | GGGSGGGGSGGGGSDIQMTQSPS | | CGATGAGCTGGGTTCGCCA |
| | | SLSASVGDRVTITCKASPDINSYLN | | GGCCCCCGGCAAGGGACTT |
| | | WYQQKPGKAPKLLIYRANRLVDGV | | GAGTGGGTTAGTTCGATCT |
| | | PSRFSGSGSGTDYTLTISSLQPEDFA | | CCCGCGGAGGCACCACATA |
| | | TYYCLQYDEFPYTFGAGTKVEIKKPT | | TTATCCTGACTCGGTTAAGG |
| | | TTPAPRPPTPAPTIASQPLSLRPEAS | | GACGCTTCACTATCTCTAGG |
| | | RPAAGGAVHTRGLDFASDKPTTTP | | GACAATTCAAAGAACACAC |
| | | APRPPTPAPTIASQPLSLRPEASRPA | | TGTATCTCCAAATGAACTCC |
| | | AGGAVHTRGLDFASDKPTTTPAPR | | TTGCGGGCCGAGGACACTG |
| | | PPTPAPTIASQPLSLRPEACRPAAG | | CTGTGTATTATTGCGGACG |
| | | GAVHTRGLDFACDIYIWAPLAGTC | | ATACGACTACGATGGGTAT |
| | | GVLLLSLVITLYCNHRNRSKRSRGG | | TACGCCATGGATTACTGGG |
| | | HSDYMNMTPRRPGPTRKHYQPYA | | GGCAAGGTACACTGGTCAC |
| | | PPRDFAAYRSRVKFSRSADAPAYQ | | TGTGAGTTCGGGGGGCGGC |
| | | QGQNQLYNELNLGRREEYDVLDKR | | GGAAGTGGTGGAGGGGGA |
| | | RGRDPEMGGKPRRKNPQEGLYNE | | AGTGGTGGAGGAGGAAGC |
| | | LQKDKMAEAYSEIGMKGERRRGK | | GATATACAGATGACACAGA |
| | | GHDGLYQGLSTATKDTYDALHMQ | | GCCCTTCAAGTTTATCTGCA |
| | | ALPPR | | AGCGTCGGCGATCGTGTTA |
| | | | | CAATAACTTGCAAGGCATCT |
| | | | | CCCGACATCAATTCCTACCT |
| | | | | CAACTGGTATCAGCAGAAG |
| | | | | CCTGGGAAGGCTCCTAAGC |
| | | | | TGCTTATTTACAGAGCAAAT |
| | | | | CGCCTGGTGGACGGCGTGC |
| | | | | CCAGTCGGTTTTCCGGGTCT |
| | | | | GGGAGCGGAACGGATTACA |
| | | | | CACTGACCATCTCAAGCCTG |
| | | | | CAACCCGAAGACTTCGCTAC |
| | | | | ATATTACTGCCTTCAGTATG |
| | | | | ATGAGTTCCCATATACCTTC |
| | | | | GGCGCTGGGACCAAGGTG |
| | | | | GAGATAAAGAAGCCTACCA |
| | | | | CCACCCCCGCACCTCGTCCT |
| | | | | CCAACCCCTGCACCTACGAT |
| | | | | TGCCAGTCAGCCTCTTTCAC |
| | | | | TGCGGCCTGAGGCCAGCAG |
| | | | | ACCAGCTGCCGGCGGTGCC |
| | | | | GTCCATACAAGAGGACTGG |
| | | | | ACTTCGCGTCCGATAAACCT |
| | | | | ACTACCACTCCAGCCCCAAG |
| | | | | GCCCCCAACCCCAGCACCG |
| | | | | ACTATCGCATCACAGCCTTT |
| | | | | GTCACTGCGTCCTGAAGCC |
| | | | | AGCCGGCCAGCTGCAGGG |
| | | | | GGGGCCGTCCACACAAGGG |
| | | | | GACTCGACTTTGCGAGTGA |
| | | | | TAAGCCCACCACCACCCCTG |
| | | | | CCCCTAGACCTCCAACCCCA |
| | | | | GCCCCTACAATCGCCAGCCA |
| | | | | GCCCCTGAGCCTGAGGCCC |
| | | | | GAAGCCTGTAGACCTGCCG |
| | | | | CTGGCGGAGCCGTGCACAC |
| | | | | CAGAGGCCTGGATTTCGCC |
| | | | | TGCGACATCTACATCTGGG |
| | | | | CCCCTCTGGCCGGCACCTGT |
| | | | | GGCGTGCTGCTGCTGAGCC |
| | | | | TGGTCATCACCCTGTACTGC |
| | | | | AACCACCGGAATAGGAGCA |
| | | | | AGCGGAGCAGAGGCGGCC |
| | | | | ACAGCGACTACATGAACAT |
| | | | | GACCCCCCGGAGGCCTGGC |
| | | | | CCCACCCGGAAGCACTACC |
| | | | | AGCCCTACGCCCCTCCCAGG |
| | | | | GACTTCGCCGCCTACCGGA |
| | | | | GCCGGGTGAAGTTCAGCCG |
| | | | | GAGCGCCGACGCCCCTGCC |
| | | | | TACCAGCAGGGCCAGAACC |
| | | | | AGCTGTACAACGAGCTGAA |
| | | | | CCTGGGCCGGAGGGAGGA |
| | | | | GTACGACGTGCTGGACAAG |
| | | | | CGGAGAGGCCGGGACCCT |
| | | | | GAGATGGGCGGCAAGCCCC |
| | | | | GGAGAAAGAACCCTCAGGA |
| | | | | GGGCCTGTATAACGAACTG |
| | | | | CAGAAAGACAAGATGGCCG |
| | | | | AGGCCTACAGCGAGATCGG |
| | | | | CATGAAGGGCGAGCGGCG |
| | | | | GAGGGGCAAGGGCCACGA |
| | | | | CGGCCTGTACCAGGGCCTG |
| | | | | AGCACCGCCACCAAGGATA |
| | | | | CCTACGACGCCCTGCACATG |
| | | | | CAGGCCCTGCCCCCCAGA |
| hROR1 | 625 | EVQLVESGGGLVQPGGSLRLSCAA | 626 | GAAGTGCAACTGGTCGAGT |
| (VH_5-VL_16). | | SGFTFSSYAMSWVRQAPGKGLEW | | CTGGGGGCGGCCTTGTGCA |
| CD8a(3x). | | VSSISRGGTTYYPDSVKGRFTISRDN | | ACCTGGAGGCAGCCTTCGA |
| CD28z | | SKNTLYLQMNSLRAEDTAVYYCGR | | CTCAGTTGCGCCGCGTCTG |
| | | YDYDGYYAMDYWGQGTLVTVSSG | | GTTTTACCTTCTCCTCTTACG |
| | | GGGSGGGGSGGGGSDIQMTQSPS | | CGATGAGCTGGGTTCGCCA |
| | | SLSASVGDRVTITCKASPDINSYLN | | GGCCCCCGGCAAGGGACTT |
| | | WYQQKPGKAPKVLIYRANRLVDG | | GAGTGGGTTAGTTCGATCT |
| | | VPSRFSGSGSGTDYTLTISSLQPEDF | | CCCGCGGAGGCACCACATA |
| | | ATYYCLQYDEFPYTFGQGTKVEIKK | | TTATCCTGACTCGGTTAAGG |
| | | PTTTPAPRPPTPAPTIASQPLSLRPE | | GACGCTTCACTATCTCTAGG |
| | | ASRPAAGGAVHTRGLDFASDKPTT | | GACAATTCAAAGAACACAC |
| | | TPAPRPPTPAPTIASQPLSLRPEASR | | TGTATCTCCAAATGAACTCC |
| | | PAAGGAVHTRGLDFASDKPTTTPA | | TTGCGGGCCGAGGACACTG |
| | | PRPPTPAPTIASQPLSLRPEACRPAA | | CTGTGTATTATTGCGGACG |
| | | GGAVHTRGLDFACDIYIWAPLAGT | | ATACGACTACGATGGGTAT |
| | | CGVLLLSLVITLYCNHRNRSKRSRG | | TACGCCATGGATTACTGGG |
| | | GHSDYMNMTPRRPGPTRKHYQPY | | GGCAAGGTACACTGGTCAC |
| | | APPRDFAAYRSRVKFSRSADAPAY | | TGTGAGTTCGGGGGGCGGC |
| | | QQGQNQLYNELNLGRREEYDVLD | | GGAAGTGGTGGAGGGGGA |
| | | KRRGRDPEMGGKPRRKNPQEGLY | | AGTGGTGGAGGAGGAAGC |
| | | NELQKDKMAEAYSEIGMKGERRR | | GATATTCAGATGACCCAGTC |
| | | GKGHDGLYQGLSTATKDTYDALH | | GCCCAGCAGTCTCTCGGCCT |
| | | MQALPPR | | CAGTGGGCGACCGGGTCAC |
| | | | | TATCACTTGCAAAGCAAGTC |
| | | | | CTGATATAAACTCCTATCTT |
| | | | | AATTGGTATCAGCAGAAGC |
| | | | | CCGGCAAGGCACCTAAGGT |
| | | | | TCTGATATATCGCGCAAATC |
| | | | | GGCTCGTGGATGGAGTACC |
| | | | | CAGCCGATTTTCCGGCAGC |
| | | | | GGCTCAGGCACTGACTACA |
| | | | | CACTGACAATCAGCAGCTT |
| | | | | GCAGCCTGAAGATTTCGCC |
| | | | | ACATACTATTGTCTACAGTA |
| | | | | CGACGAGTTCCCTTATACAT |
| | | | | TCGGCCAGGGGACCAAGGT |
| | | | | CGAGATCAAGAAGCCTACC |
| | | | | ACCACCCCCGCACCTCGTCC |
| | | | | TCCAACCCCTGCACCTACGA |
| | | | | TTGCCAGTCAGCCTCTTTCA |
| | | | | CTGCGGCCTGAGGCCAGCA |
| | | | | GACCAGCTGCCGGCGGTGC |
| | | | | CGTCCATACAAGAGGACTG |
| | | | | GACTTCGCGTCCGATAAACC |
| | | | | TACTACCACTCCAGCCCCAA |
| | | | | GGCCCCCAACCCCAGCACC |
| | | | | GACTATCGCATCACAGCCTT |
| | | | | TGTCACTGCGTCCTGAAGCC |
| | | | | AGCCGGCCAGCTGCAGGG |
| | | | | GGGGCCGTCCACACAAGGG |
| | | | | GACTCGACTTTGCGAGTGA |
| | | | | TAAGCCCACCACCACCCCTG |
| | | | | CCCCTAGACCTCCAACCCCA |
| | | | | GCCCCTACAATCGCCAGCCA |
| | | | | GCCCCTGAGCCTGAGGCCC |
| | | | | GAAGCCTGTAGACCTGCCG |
| | | | | CTGGCGGAGCCGTGCACAC |
| | | | | CAGAGGCCTGGATTTCGCC |
| | | | | TGCGACATCTACATCTGGG |
| | | | | CCCCTCTGGCCGGCACCTGT |
| | | | | GGCGTGCTGCTGCTGAGCC |
| | | | | TGGTCATCACCCTGTACTGC |
| | | | | AACCACCGGAATAGGAGCA |
| | | | | AGCGGAGCAGAGGCGGCC |
| | | | | ACAGCGACTACATGAACAT |
| | | | | GACCCCCCGGAGGCCTGGC |
| | | | | CCCACCCGGAAGCACTACC |
| | | | | AGCCCTACGCCCCTCCCAGG |
| | | | | GACTTCGCCGCCTACCGGA |
| | | | | GCCGGGTGAAGTTCAGCCG |
| | | | | GAGCGCCGACGCCCCTGCC |
| | | | | TACCAGCAGGGCCAGAACC |
| | | | | AGCTGTACAACGAGCTGAA |
| | | | | CCTGGGCCGGAGGGAGGA |
| | | | | GTACGACGTGCTGGACAAG |
| | | | | CGGAGAGGCCGGGACCCT |
| | | | | GAGATGGGCGGCAAGCCCC |
| | | | | GGAGAAAGAACCCTCAGGA |
| | | | | GGGCCTGTATAACGAACTG |
| | | | | CAGAAAGACAAGATGGCCG |
| | | | | AGGCCTACAGCGAGATCGG |
| | | | | CATGAAGGGCGAGCGGCG |
| | | | | GAGGGGCAAGGGCCACGA |
| | | | | CGGCCTGTACCAGGGCCTG |
| | | | | AGCACCGCCACCAAGGATA |
| | | | | CCTACGACGCCCTGCACATG |
| | | | | CAGGCCCTGCCCCCCAGA |
| hROR1 | 627 | EVQLVESGGGLVQPGGSLRLSCSAS | 628 | GAGGTTCAACTCGTGGAGT |
| (VH_18- | | GFTFSSYAMSWVRQVPGKGLVWI | | CTGGAGGCGGGCTAGTGCA |
| VL_04). | | SSISRGGTTYYADSVRGRFIISRDNA | | GCCTGGCGGCTCCCTGCGA |
| CD8a(3x). | | KNTLYLEMNNLRGEDTAVYYCARY | | CTGTCTTGCAGCGCATCAG |
| CD28z | | DYDGYYAMDYWGQGTLVTVSSG | | GCTTTACATTCAGTTCTTAT |
| | | GGGSGGGGSGGGGSDIQMTQSPS | | GCCATGAGCTGGGTGAGGC |
| | | SLSASVGDRVTITCQASPDINSYLN | | AGGTGCCCGGCAAGGGTCT |
| | | WYQQKPGKAPKLLIYRANNLETGV | | GGTGTGGATCAGCTCAATC |
| | | PSRFSGSGSGTDFTLTISSLQPEDIA | | TCCAGGGGCGGGACTACAT |
| | | TYYCLQYDEFPYTFGQGTKLEIKKPT | | ATTACGCCGATTCGGTCAG |
| | | TTPAPRPPTPAPTIASQPLSLRPEAS | | GGGTCGTTTTATCATTAGCA |
| | | RPAAGGAVHTRGLDFASDKPTTTP | | GGGATAATGCCAAGAACAC |
| | | APRPPTPAPTIASQPLSLRPEASRPA | | CTTGTATTTGGAGATGAAC |
| | | AGGAVHTRGLDFASDKPTTTPAPR | | AACCTAAGAGGCGAAGACA |
| | | PPTPAPTIASQPLSLRPEACRPAAG | | CCGCTGTGTACTATTGTGCC |
| | | GAVHTRGLDFACDIYIWAPLAGTC | | CGTTACGACTACGATGGGT |
| | | GVLLLSLVITLYCNHRNRSKRSRGG | | ACTACGCCATGGACTATTG |
| | | HSDYMNMTPRRPGPTRKHYQPYA | | GGGCCAGGGAACCTTGGTG |
| | | PPRDFAAYRSRVKFSRSADAPAYQ | | ACTGTGTCAAGTGGCGGGG |
| | | QGQNQLYNELNLGRREEYDVLDKR | | GCGGCAGCGGAGGCGGTG |
| | | RGRDPEMGGKPRRKNPQEGLYNE | | GCAGCGGAGGCGGCGGTT |
| | | LQKDKMAEAYSEIGMKGERRRGK | | CTGATATTCAAATGACGCAA |
| | | GHDGLYQGLSTATKDTYDALHMQ | | AGTCCCAGCAGCCTCTCCGC |
| | | ALPPR | | CTCCGTTGGAGACAGGGTG |
| | | | | ACTATTACATGCCAAGCCAG |
| | | | | CCCCGATATTAATAGCTACT |
| | | | | TAAATTGGTATCAGCAGAA |
| | | | | ACCTGGGAAGGCACCTAAA |
| | | | | CTTCTCATCTACCGCGCTAA |
| | | | | CAATCTGGAGACCGGCGTG |
| | | | | CCGTCTAGATTTTCCGGCTC |
| | | | | TGGATCAGGGACCGATTTT |
| | | | | ACTCTGACAATTAGTTCCCT |
| | | | | GCAACCCGAAGACATCGCC |
| | | | | ACTTATTATTGCCTGCAATA |
| | | | | TGATGAGTTTCCTTACACAT |
| | | | | TTGGTCAGGGAACTAAACT |
| | | | | AGAGATTAAGAAGCCTACC |
| | | | | ACCACCCCCGCACCTCGTCC |
| | | | | TCCAACCCCTGCACCTACGA |
| | | | | TTGCCAGTCAGCCTCTTTCA |
| | | | | CTGCGGCCTGAGGCCAGCA |
| | | | | GACCAGCTGCCGGCGGTGC |
| | | | | CGTCCATACAAGAGGACTG |
| | | | | GACTTCGCGTCCGATAAACC |
| | | | | TACTACCACTCCAGCCCCAA |
| | | | | GGCCCCCAACCCCAGCACC |
| | | | | GACTATCGCATCACAGCCTT |
| | | | | TGTCACTGCGTCCTGAAGCC |
| | | | | AGCCGGCCAGCTGCAGGG |
| | | | | GGGGCCGTCCACACAAGGG |
| | | | | GACTCGACTTTGCGAGTGA |
| | | | | TAAGCCCACCACCACCCCTG |
| | | | | CCCCTAGACCTCCAACCCCA |
| | | | | GCCCCTACAATCGCCAGCCA |
| | | | | GCCCCTGAGCCTGAGGCCC |
| | | | | GAAGCCTGTAGACCTGCCG |
| | | | | CTGGCGGAGCCGTGCACAC |
| | | | | CAGAGGCCTGGATTTCGCC |
| | | | | TGCGACATCTACATCTGGG |
| | | | | CCCCTCTGGCCGGCACCTGT |
| | | | | GGCGTGCTGCTGCTGAGCC |
| | | | | TGGTCATCACCCTGTACTGC |
| | | | | AACCACCGGAATAGGAGCA |
| | | | | AGCGGAGCAGAGGCGGCC |
| | | | | ACAGCGACTACATGAACAT |
| | | | | GACCCCCCGGAGGCCTGGC |
| | | | | CCCACCCGGAAGCACTACC |
| | | | | AGCCCTACGCCCCTCCCAGG |
| | | | | GACTTCGCCGCCTACCGGA |
| | | | | GCCGGGTGAAGTTCAGCCG |
| | | | | GAGCGCCGACGCCCCTGCC |
| | | | | TACCAGCAGGGCCAGAACC |
| | | | | AGCTGTACAACGAGCTGAA |
| | | | | CCTGGGCCGGAGGGAGGA |
| | | | | GTACGACGTGCTGGACAAG |
| | | | | CGGAGAGGCCGGGACCCT |
| | | | | GAGATGGGCGGCAAGCCCC |
| | | | | GGAGAAAGAACCCTCAGGA |
| | | | | GGGCCTGTATAACGAACTG |
| | | | | CAGAAAGACAAGATGGCCG |
| | | | | AGGCCTACAGCGAGATCGG |
| | | | | CATGAAGGGCGAGCGGCG |
| | | | | GAGGGGCAAGGGCCACGA |
| | | | | CGGCCTGTACCAGGGCCTG |
| | | | | AGCACCGCCACCAAGGATA |
| | | | | CCTACGACGCCCTGCACATG |
| | | | | CAGGCCCTGCCCCCCAGA |
| | | | | GAGGTTCAACTCGTGGAGT |
| | | | | CTGGAGGCGGGCTAGTGCA |
| | | | | GCCTGGCGGCTCCCTGCGA |
| | | | | CTGTCTTGCAGCGCATCAG |
| | | | | GCTTTACATTCAGTTCTTAT |
| | | | | GCCATGAGCTGGGTGAGGC |
| | | | | AGGTGCCCGGCAAGGGTCT |
| | | | | GGTGTGGATCAGCTCAATC |
| | | | | TCCAGGGGCGGGACTACAT |
| hROR1 | 629 | EVQLVESGGGLVQPGGSLRLSCSAS | 630 | ATTACGCCGATTCGGTCAG |
| (VH_18- | | GFTFSSYAMSWVRQVPGKGLVWI | | GGGTCGTTTTATCATTAGCA |
| VL_14). | | SSISRGGTTYYADSVRGRFIISRDNA | | GGGATAATGCCAAGAACAC |
| CD8a(3x). | | KNTLYLEMNNLRGEDTAVYYCARY | | CTTGTATTTGGAGATGAAC |
| CD28z | | DYDGYYAMDYWGQGTLVTVSSG | | AACCTAAGAGGCGAAGACA |
| | | GGGSGGGGSGGGGSDIQMTQSPS | | CCGCTGTGTACTATTGTGCC |
| | | SLSASVGDRVTITCKASPDINSYLN | | CGTTACGACTACGATGGGT |
| | | WYQQKPGKAPKLLIYRANRLVDGV | | ACTACGCCATGGACTATTG |
| | | PSRFSGSGSGTDYTLTISSLQPEDFA | | GGGCCAGGGAACCTTGGTG |
| | | TYYCLQYDEFPYTFGAGTKVEIKKPT | | ACTGTGTCAAGTGGCGGGG |
| | | TTPAPRPPTPAPTIASQPLSLRPEAS | | GCGGCAGCGGAGGCGGTG |
| | | RPAAGGAVHTRGLDFASDKPTTTP | | GCAGCGGAGGCGGCGGTT |
| | | APRPPTPAPTIASQPLSLRPEASRPA | | CTGATATACAGATGACACA |
| | | AGGAVHTRGLDFASDKPTTTPAPR | | GAGCCCTTCAAGTTTATCTG |
| | | PPTPAPTIASQPLSLRPEACRPAAG | | CAAGCGTCGGCGATCGTGT |
| | | GAVHTRGLDFACDIYIWAPLAGTC | | TACAATAACTTGCAAGGCAT |
| | | GVLLLSLVITLYCNHRNRSKRSRGG | | CTCCCGACATCAATTCCTAC |
| | | HSDYMNMTPRRPGPTRKHYQPYA | | CTCAACTGGTATCAGCAGA |
| | | PPRDFAAYRSRVKFSRSADAPAYQ | | AGCCTGGGAAGGCTCCTAA |
| | | QGQNQLYNELNLGRREEYDVLDKR | | GCTGCTTATTTACAGAGCAA |
| | | RGRDPEMGGKPRRKNPQEGLYNE | | ATCGCCTGGTGGACGGCGT |
| | | LQKDKMAEAYSEIGMKGERRRGK | | GCCCAGTCGGTTTTCCGGG |
| | | GHDGLYQGLSTATKDTYDALHMQ | | TCTGGGAGCGGAACGGATT |
| | | ALPPR | | ACACACTGACCATCTCAAGC |
| | | | | CTGCAACCCGAAGACTTCG |
| | | | | CTACATATTACTGCCTTCAG |
| | | | | TATGATGAGTTCCCATATAC |
| | | | | CTTCGGCGCTGGGACCAAG |
| | | | | GTGGAGATAAAGAAGCCTA |
| | | | | CCACCACCCCCGCACCTCGT |
| | | | | CCTCCAACCCCTGCACCTAC |
| | | | | GATTGCCAGTCAGCCTCTTT |
| | | | | CACTGCGGCCTGAGGCCAG |
| | | | | CAGACCAGCTGCCGGCGGT |
| | | | | GCCGTCCATACAAGAGGAC |
| | | | | TGGACTTCGCGTCCGATAA |
| | | | | ACCTACTACCACTCCAGCCC |
| | | | | CAAGGCCCCCAACCCCAGC |
| | | | | ACCGACTATCGCATCACAGC |
| | | | | CTTTGTCACTGCGTCCTGAA |
| | | | | GCCAGCCGGCCAGCTGCAG |
| | | | | GGGGGGCCGTCCACACAAG |
| | | | | GGGACTCGACTTTGCGAGT |
| | | | | GATAAGCCCACCACCACCCC |
| | | | | TGCCCCTAGACCTCCAACCC |
| | | | | CAGCCCCTACAATCGCCAGC |
| | | | | CAGCCCCTGAGCCTGAGGC |
| | | | | CCGAAGCCTGTAGACCTGC |
| | | | | CGCTGGCGGAGCCGTGCAC |
| | | | | ACCAGAGGCCTGGATTTCG |
| | | | | CCTGCGACATCTACATCTGG |
| | | | | GCCCCTCTGGCCGGCACCT |
| | | | | GTGGCGTGCTGCTGCTGAG |
| | | | | CCTGGTCATCACCCTGTACT |
| | | | | GCAACCACCGGAATAGGAG |
| | | | | CAAGCGGAGCAGAGGCGG |
| | | | | CCACAGCGACTACATGAAC |
| | | | | ATGACCCCCCGGAGGCCTG |
| | | | | GCCCCACCCGGAAGCACTA |
| | | | | CCAGCCCTACGCCCCTCCCA |
| | | | | GGGACTTCGCCGCCTACCG |
| | | | | GAGCCGGGTGAAGTTCAGC |
| | | | | CGGAGCGCCGACGCCCCTG |
| | | | | CCTACCAGCAGGGCCAGAA |
| | | | | CCAGCTGTACAACGAGCTG |
| | | | | AACCTGGGCCGGAGGGAG |
| | | | | GAGTACGACGTGCTGGACA |
| | | | | AGCGGAGAGGCCGGGACC |
| | | | | CTGAGATGGGCGGCAAGCC |
| | | | | CCGGAGAAAGAACCCTCAG |
| | | | | GAGGGCCTGTATAACGAAC |
| | | | | TGCAGAAAGACAAGATGGC |
| | | | | CGAGGCCTACAGCGAGATC |
| | | | | GGCATGAAGGGCGAGCGG |
| | | | | CGGAGGGGCAAGGGCCAC |
| | | | | GACGGCCTGTACCAGGGCC |
| | | | | TGAGCACCGCCACCAAGGA |
| | | | | TACCTACGACGCCCTGCACA |
| | | | | TGCAGGCCCTGCCCCCCAG |
| | | | | A |
| IgG4-Fc 12 | | | | |
| amino acid | 631 | ESKYGPPCPPCP | | |
| hinge region | | | | |

RTS-COMPONENTS

| | | | | |
|---|---|---|---|---|
| VP16 | 632 | GPKKKRKVAPPTDVSLGDELHLDG | 633 | GGCCCCAAGAAGAAAAGG |
| activation | | EDVAMAHADALDDFDLDMLGDG | | AAGGTGGCCCCCCCCACCG |
| domain | | DSPGPGFTPHDSAPYGALDMADF | | ACGTGAGCCTGGGCGACGA |
| | | EFEQMFTDALGIDEYGG | | GCTGCACCTGGACGGCGAG |
| | | | | GACGTGGCCATGGCCCACG |
| | | | | CCGACGCCCTGGACGACTT |
| | | | | CGACCTGGACATGCTGGGC |
| | | | | GACGGCGACAGCCCCGGCC |
| | | | | CCGGCTTCACCCCCCACGAC |
| | | | | AGCGCCCCCTACGGCGCCC |
| | | | | TGGACATGGCCGACTTCGA |
| | | | | GTTCGAGCAGATGTTCACC |
| | | | | GACGCCCTGGGCATCGACG |
| | | | | AGTACGGCGGC |
| Retinoid x | 634 | EMPVDRILEAELAVEQKSDQGVEG | 635 | GAGATGCCCGTGGACAGGA |
| receptor | | PGGTGGSGSSPNDPVTNICQAADK | | TTCTGGAGGCCGAACTCGC |
| (RxR) | | QLFTLVEWAKRIPHFSSLPLDDQVIL | | CGTGGAGCAGAAAAGCGAC |
| | | LRAGWNELLIASFSHRSIDVRDGILL | | CAGGGCGTGGAGGGCCCC |
| | | ATGLHVHRNSAHSAGVGAIFDRVL | | GGCGGAACCGGCGGCAGC |
| | | TELVSKMRDMRMDKTELGCLRAII | | GGCAGCAGCCCCAACGACC |
| | | LFNPEVRGLKSAQEVELLREKVYAA | | CCGTGACCAACATCTGCCA |
| | | LEEYTRTTHPDEPGRFAKLLLRLPSL | | GGCCGCCGACAAGCAGCTG |
| | | RSIGLKCLEHLFFFRLIGDVPIDTFLM | | TTCACCCTGGTGGAGTGGG |
| | | EMLESPSDS | | CCAAGAGGATTCCCCACTTC |
| | | | | AGCAGCCTGCCCCTGGACG |
| | | | | ACCAGGTGATCCTGCTGAG |
| | | | | GGCCGGATGGAACGAGCTG |
| | | | | CTGATCGCCAGCTTCAGCCA |
| | | | | CAGGAGCATCGACGTGAGG |
| | | | | GACGGCATCCTGCTGGCCA |
| | | | | CCGGCCTGCACGTCCATAG |
| | | | | GAACAGCGCCCACAGCGCC |
| | | | | GGAGTGGGCGCCATCTTCG |
| | | | | ACAGGGTGCTGACCGAGCT |
| | | | | GGTGAGCAAGATGAGGGA |
| | | | | CATGAGGATGGACAAGACC |
| | | | | GAGCTGGGCTGCCTGAGGG |
| | | | | CCATCATCCTGTTCAACCCC |
| | | | | GAGGTGAGGGGCCTGAAA |
| | | | | AGCGCCCAGGAGGTGGAG |
| | | | | CTGCTGAGGGAGAAGGTGT |
| | | | | ACGCCGCCCTGGAGGAGTA |
| | | | | CACCAGGACCACCCACCCC |
| | | | | GACGAGCCCGGCAGATTCG |
| | | | | CCAAGCTGCTGCTGAGGCT |
| | | | | GCCCAGCCTGAGGAGCATC |
| | | | | GGCCTGAAGTGCCTGGAGC |
| | | | | ACCTGTTCTTCTTCAGGCTG |
| | | | | ATCGGCGACGTGCCCATCG |
| | | | | ACACCTTCCTGATGGAGAT |
| | | | | GCTGGAGAGCCCCAGCGAC |
| | | | | AGC |
| VP16-linker- | 636 | GPKKKRKVAPPTDVSLGDELHLDG | 637 | GGCCCCAAGAAGAAAAGG |
| RxR | | EDVAMAHADALDDFDLDMLGDG | | AAGGTGGCCCCCCCCACCG |
| | | DSPGPGFTPHDSAPYGALDMADF | | ACGTGAGCCTGGGCGACGA |
| | | EFEQMFTDALGIDEYGGEFEMPVD | | GCTGCACCTGGACGGCGAG |
| | | RILEAELAVEQKSDQGVEGPGGTG | | GACGTGGCCATGGCCCACG |
| | | GSGSSPNDPVTNICQAADKQLFTL | | CCGACGCCCTGGACGACTT |
| | | VEWAKRIPHFSSLPLDDQVILLRAG | | CGACCTGGACATGCTGGGC |
| | | WNELLIASFSHRSIDVRDGILLATGL | | GACGGCGACAGCCCCGGCC |
| | | HVHRNSAHSAGVGAIFDRVLTELV | | CCGGCTTCACCCCCCACGAC |
| | | SKMRDMRMDKTELGCLRAIILFNP | | AGCGCCCCCTACGGCGCCC |
| | | EVRGLKSAQEVELLREKVYAALEEY | | TGGACATGGCCGACTTCGA |
| | | TRTTHPDEPGRFAKLLLRLPSLRSIG | | GTTCGAGCAGATGTTCACC |
| | | LKCLEHLFFFRLIGDVPIDTFLMEML | | GACGCCCTGGGCATCGACG |
| | | ESPSDS | | AGTACGGCGGCGAATTCGA |
| | | | | GATGCCCGTGGACAGGATT |
| | | | | CTGGAGGCCGAACTCGCCG |
| | | | | TGGAGCAGAAAAGCGACCA |
| | | | | GGGCGTGGAGGGCCCCGG |
| | | | | CGGAACCGGCGGCAGCGG |
| | | | | CAGCAGCCCCAACGACCCC |
| | | | | GTGACCAACATCTGCCAGG |
| | | | | CCGCCGACAAGCAGCTGTT |
| | | | | CACCCTGGTGGAGTGGGCC |
| | | | | AAGAGGATTCCCCACTTCA |
| | | | | GCAGCCTGCCCCTGGACGA |
| | | | | CCAGGTGATCCTGCTGAGG |
| | | | | GCCGGATGGAACGAGCTGC |
| | | | | TGATCGCCAGCTTCAGCCAC |
| | | | | AGGAGCATCGACGTGAGG |
| | | | | GACGGCATCCTGCTGGCCA |
| | | | | CCGGCCTGCACGTCCATAG |
| | | | | GAACAGCGCCCACAGCGCC |
| | | | | GGAGTGGGCGCCATCTTCG |
| | | | | ACAGGGTGCTGACCGAGCT |
| | | | | GGTGAGCAAGATGAGGGA |
| | | | | CATGAGGATGGACAAGACC |
| | | | | GAGCTGGGCTGCCTGAGGG |
| | | | | CCATCATCCTGTTCAACCCC |
| | | | | GAGGTGAGGGGCCTGAAA |
| | | | | AGCGCCCAGGAGGTGGAG |
| | | | | CTGCTGAGGGAGAAGGTGT |
| | | | | ACGCCGCCCTGGAGGAGTA |
| | | | | CACCAGGACCACCCACCCC |
| | | | | GACGAGCCCGGCAGATTCG |
| | | | | CCAAGCTGCTGCTGAGGCT |
| | | | | GCCCAGCCTGAGGAGCATC |
| | | | | GGCCTGAAGTGCCTGGAGC |
| | | | | ACCTGTTCTTCTTCAGGCTG |
| | | | | ATCGGCGACGTGCCCATCG |
| | | | | ACACCTTCCTGATGGAGAT |
| | | | | GCTGGAGAGCCCCAGCGAC |
| | | | | AGC |
| GAL4 DNA | 638 | MKLLSSIEQACDICRLKKLKCSKEKP | 639 | ATGAAGCTGCTGAGCAGCA |
| Binding | | KCAKCLKNNWECRYSPKTKRSPLTR | | TCGAGCAGGCTTGCGACAT |
| Domain | | AHLTEVESRLERLEQLFLLIFPREDLD | | CTGCAGGCTGAAGAAGCTG |
| | | MILKMDSLQDIKALLTGLFVQDNV | | AAGTGCAGCAAGGAGAAG |
| | | NKDAVTDRLASVETDMPLTLRQHR | | CCCAAGTGCGCCAAGTGCC |
| | | ISATSSSEESSNKGQRQLTVSPEF | | TGAAGAACAACTGGGAGTG |
| | | | | CAGATACAGCCCCAAGACC |
| | | | | AAGAGGAGCCCCCTGACCA |
| | | | | GGGCCCACCTGACCGAGGT |
| | | | | GGAGAGCAGGCTGGAGAG |
| | | | | GCTGGAGCAGCTGTTCCTG |
| | | | | CTGATCTTCCCCAGGGAGG |
| | | | | ACCTGGACATGATCCTGAA |
| | | | | GATGGACAGCCTGCAAGAC |
| | | | | ATCAAGGCCCTGCTGACCG |
| | | | | GCCTGTTCGTGCAGGACAA |
| | | | | CGTGAACAAGGACGCCGTG |
| | | | | ACCGACAGGCTGGCCAGCG |
| | | | | TGGAGACCGACATGCCCCT |
| | | | | GACCCTGAGGCAGCACAGG |
| | | | | ATCAGCGCCACCAGCAGCA |
| | | | | GCGAGGAGAGCAGCAACA |
| | | | | AGGGCCAGAGGCAGCTGAC |
| | | | | CGTGAGCCCCGAGTTT |
| Ecdysone | 640 | IRPECVVPETQCAMKRKEKKAQKE | 641 | ATCAGGCCCGAGTGCGTGG |
| Receptor | | KDKLPVSTTTVDDHMPPIMQCEPP | | TGCCCGAGACCCAGTGCGC |
| Ligand | | PPEAARIHEVVPRFLSDKLLVTNRQ | | CATGAAAAGGAAGGAGAA |
| Binding | | KNIPQLTANQQFLIARLIWYQDGYE | | GAAGGCCCAGAAGGAGAA |
| Domain-VY | | QPSDEDLKRITQTWQQADDENEE | | GGACAAGCTGCCCGTGAGC |
| variant (EcR) | | SDTPFRQITEMTILTVQLIVEFAKGL | | ACCACCACCGTCGATGACC |
| | | PGFAKISQPDQITLLKACSSEVMML | | ACATGCCCCCCATCATGCAG |
| | | RVARRYDAASDSILFANNQAYTRD | | TGCGAGCCCCCCCCCCCCGA |
| | | NYRKAGMAEVIEDLLHFCRCMYS | | GGCCGCCAGGATTCACGAG |
| | | MALDNIHYALLTAVVIFSDRPGLEQ | | GTCGTGCCCAGGTTCCTGA |
| | | PQLVEEIQRYYLNTLRIYILNQLSGS | | GCGACAAGCTGCTGGTGAC |
| | | ARSSVIYGKILSILSELRTLGMQNSN | | CAACAGGCAGAAGAACATC |
| | | MCISLKLKNRKLPPFLEEIWDVAD | | CCCCAGCTGACCGCCAACC |
| | | MSHTQPPPILESPTNL | | AGCAGTTCCTGATCGCCAG |
| | | | | GCTGATCTGGTATCAGGAC |
| | | | | GGCTACGAGCAGCCCAGCG |
| | | | | ACGAGGACCTGAAAAGGAT |
| | | | | CACCCAGACCTGGCAGCAG |
| | | | | GCCGACGACGAGAACGAG |
| | | | | GAGAGCGACACCCCCTTCA |
| | | | | GGCAGATCACCGAGATGAC |
| | | | | CATCCTGACCGTGCAGCTG |
| | | | | ATCGTGGAGTTCGCCAAGG |
| | | | | GCCTGCCCGGATTCGCCAA |
| | | | | GATCAGCCAGCCCGACCAG |
| | | | | ATCACCCTGCTGAAGGCTT |
| | | | | GCAGCAGCGAGGTGATGAT |
| | | | | GCTGAGGGTGGCCAGGAG |
| | | | | GTACGACGCCGCCAGCGAC |
| | | | | AGCATCCTGTTCGCCAACAA |
| | | | | CCAGGCTTACACCAGGGAC |
| | | | | AACTACAGGAAGGCTGGCA |
| | | | | TGGCCGAGGTGATCGAGGA |
| | | | | CCTCCTGCACTTCTGCAGAT |
| | | | | GTATGTACAGCATGGCCCT |
| | | | | GGACAACATCCACTACGCC |
| | | | | CTGCTGACCGCCGTGGTGA |
| | | | | TCTTCAGCGACAGGCCCGG |
| | | | | CCTGGAGCAGCCCCAGCTG |
| | | | | GTGGAGGAGATCCAGAGGT |
| | | | | ACTACCTGAACACCCTGAG |
| | | | | GATCTACATCCTGAACCAGC |
| | | | | TGAGCGGCAGCGCCAGGA |
| | | | | GCAGCGTGATCTACGGCAA |
| | | | | GATCCTGAGCATCCTGAGC |
| | | | | GAGCTGAGGACCCTGGGAA |
| | | | | TGCAGAACAGCAATATGTG |
| | | | | TATCAGCCTGAAGCTGAAG |
| | | | | AACAGGAAGCTGCCCCCCT |
| | | | | TCCTGGAGGAGATTTGGGA |
| | | | | CGTGGCCGACATGAGCCAC |
| | | | | ACCCAGCCCCCCCCCATCCT |
| | | | | GGAGAGCCCCACCAACCTG |
| Ecdysone | 642 | RPECVVPETQCAMKRKEKKAQKEK | 643 | CGGCCTGAGTGCGTAGTAC |
| Receptor | | DKLPVSTTTVDDHMPPIMQCEPPP | | CCGAGACTCAGTGCGCCAT |
| Ligand | | PEAARIHEVVPRFLSDKLLVTNRQK | | GAAGCGGAAAGAGAAGAA |
| Binding | | NIPQLTANQQFLIARLIWYQDGYE | | AGCACAGAAGGAGAAGGA |
| Domain_VY | | QPSDEDLKRITQTWQQADDENEE | | CAAACTGCCTGTCAGCACG |
| variant (EcR) | | SDTPFRQITEMTILTVQLIVEFAKGL | | ACGACGGTGGACGACCACA |
| | | PGFAKISQPDQITLLKACSSEVMML | | TGCCGCCCATTATGCAGTGT |
| | | RVARRYDAASDSILFANNQAYTRD | | GAACCTCCACCTCCTGAAGC |
| | | NYRKAGMAEVIEDLLHFCRCMYS | | AGCAAGGATTCACGAAGTG |
| | | MALDNIHYALLTAVVIFSDRPGLEQ | | GTCCCAAGGTTTCTCTCCGA |
| | | PQLVEEIQRYYLNTLRIYILNQLSGS | | CAAGCTGTTGGTGACAAAC |
| | | ARSSVIYGKILSILSELRTLGMQNSN | | CGGCAGAAAAACATCCCCC |
| | | MCISLKLKNRKLPPFLEEIWDVAD | | AGTTGACAGCCAACCAGCA |
| | | MSHTQPPPILESPTNL | | GTTCCTTATCGCCAGGCTCA |
| | | | | TCTGGTACCAGGACGGGTA |
| | | | | CGAGCAGCCTTCTGATGAA |
| | | | | GATTTGAAGAGGATTACGC |
| | | | | AGACGTGGCAGCAAGCGG |
| | | | | ACGATGAAAACGAAGAGTC |
| | | | | GGACACTCCCTTCCGCCAGA |
| | | | | TCACAGAGATGACTATCCTC |
| | | | | ACGGTCCAACTTATCGTGG |
| | | | | AGTTCGCGAAGGGATTGCC |
| | | | | AGGGTTCGCCAAGATCTCG |
| | | | | CAGCCTGATCAAATTACGCT |
| | | | | GCTTAAGGCTTGCTCAAGT |
| | | | | GAGGTAATGATGCTCCGAG |
| | | | | TCGCGCGACGATACGATGC |
| | | | | GGCCTCAGACAGTATTCTGT |
| | | | | TCGCGAACAACCAAGCGTA |
| | | | | CACTCGCGACAACTACCGC |
| | | | | AAGGCTGGCATGGCCGAGG |
| | | | | TCATCGAGGATCTACTGCAC |
| | | | | TTCTGCCGGTGCATGTACTC |
| | | | | TATGGCGTTGGACAACATC |
| | | | | CATTACGCGCTGCTCACGG |
| | | | | CTGTCGTCATCTTTTCTGAC |
| | | | | CGGCCAGGGTTGGAGCAGC |
| | | | | CGCAACTGGTGGAAGAGAT |
| | | | | CCAGCGGTACTACCTGAAT |
| | | | | ACGCTCCGCATCTATATCCT |
| | | | | GAACCAGCTGAGCGGGTCG |
| | | | | GCGCGTTCGTCCGTCATATA |
| | | | | CGGCAAGATCCTCTCAATCC |
| | | | | TCTCTGAGCTACGCACGCTC |
| | | | | GGCATGCAAAACTCCAACA |
| | | | | TGTGCATCTCCCTCAAGCTC |
| | | | | AAGAACAGAAAGCTGCCGC |
| | | | | CTTTCCTCGAGGAGATCTG |
| | | | | GGATGTGGCGGACATGTCG |
| | | | | CACACCCAACCGCCGCCTAT |
| | | | | CCTCGAGTCCCCCACGAATC |
| | | | | TCTAG |
| GAL4-Linker- | 644 | MKLLSSIEQACDICRLKKLKCSKEKP | 645 | ATGAAGCTACTGTCTTCTAT |
| EcR | | KCAKCLKNNWECRYSPKTKRSPLTR | | CGAACAAGCATGCGATATT |
| | | AHLTEVESRLERLEQLFLLIFPREDLD | | TGCCGACTTAAAAAGCTCA |
| | | MILKMDSLQDIKALLTGLFVQDNV | | AGTGCTCCAAAGAAAAACC |
| | | NKDAVTDRLASVETDMPLTLRQHR | | GAAGTGCGCCAAGTGTCTG |
| | | ISATSSSEESSNKGQRQLTVSPEFPG | | AAGAACAACTGGGAGTGTC |
| | | IRPECVVPETQCAMKRKEKKAQKE | | GCTACTCTCCCAAAACCAAA |
| | | KDKLPVSTTTVDDHMPPIMQCEPP | | AGGTCTCCGCTGACTAGGG |
| | | PPEAARIHEVVPRFLSDKLLVTNRQ | | CACATCTGACAGAAGTGGA |
| | | KNIPQLTANQQFLIARLIWYQDGYE | | ATCAAGGCTAGAAAGACTG |
| | | QPSDEDLKRITQTWQQADDENEE | | GAACAGCTATTTCTACTGAT |
| | | SDTPFRQITEMTILTVQLIVEFAKGL | | TTTTCCTCGAGAAGACCTTG |
| | | PGFAKISQPDQITLLKACSSEVMML | | ACATGATTTTGAAAATGGAT |
| | | RVARRYDAASDSILFANNQAYTRD | | TCTTTACAGGATATAAAAGC |
| | | NYRKAGMAEVIEDLLHFCRCMYS | | ATTGTTAACAGGATTATTTG |
| | | MALDNIHYALLTAVVIFSDRPGLEQ | | TACAAGATAATGTGAATAA |
| | | PQLVEEIQRYYLNTLRIYILNQLSGS | | AGATGCCGTCACAGATAGA |
| | | ARSSVIYGKILSILSELRTLGMQNSN | | TTGGCTTCAGTGGAGACTG |
| | | MCISLKLKNRKLPPFLEEIWDVAD | | ATATGCCTCTAACATTGAGA |
| | | MSHTQPPPILESPTNL | | CAGCATAGAATAAGTGCGA |
| | | | | CATCATCATCGGAAGAGAG |
| | | | | TAGTAACAAAGGTCAAAGA |
| | | | | CAGTTGACTGTATCGCCGG |
| | | | | AATTCCCGGGGATCCGGCC |
| | | | | TGAGTGCGTAGTACCCGAG |
| | | | | ACTCAGTGCGCCATGAAGC |
| | | | | GGAAAGAGAAGAAAGCAC |
| | | | | AGAAGGAGAAGGACAAAC |
| | | | | TGCCTGTCAGCACGACGAC |
| | | | | GGTGGACGACCACATGCCG |
| | | | | CCCATTATGCAGTGTGAACC |
| | | | | TCCACCTCCTGAAGCAGCAA |
| | | | | GGATTCACGAAGTGGTCCC |
| | | | | AAGGTTTCTCTCCGACAAGC |
| | | | | TGTTGGTGACAAACCGGCA |
| | | | | GAAAAACATCCCCCAGTTG |
| | | | | ACAGCCAACCAGCAGTTCCT |
| | | | | TATCGCCAGGCTCATCTGGT |
| | | | | ACCAGGACGGGTACGAGCA |
| | | | | GCCTTCTGATGAAGATTTGA |
| | | | | AGAGGATTACGCAGACGTG |
| | | | | GCAGCAAGCGGACGATGAA |
| | | | | AACGAAGAGTCGGACACTC |
| | | | | CCTTCCGCCAGATCACAGA |
| | | | | GATGACTATCCTCACGGTCC |
| | | | | AACTTATCGTGGAGTTCGC |
| | | | | GAAGGGATTGCCAGGGTTC |
| | | | | GCCAAGATCTCGCAGCCTG |
| | | | | ATCAAATTACGCTGCTTAAG |
| | | | | GCTTGCTCAAGTGAGGTAA |
| | | | | TGATGCTCCGAGTCGCGCG |
| | | | | ACGATACGATGCGGCCTCA |
| | | | | GACAGTATTCTGTTCGCGA |
| | | | | ACAACCAAGCGTACACTCG |
| | | | | CGACAACTACCGCAAGGCT |
| | | | | GGCATGGCCGAGGTCATCG |
| | | | | AGGATCTACTGCACTTCTGC |
| | | | | CGGTGCATGTACTCTATGG |
| | | | | CGTTGGACAACATCCATTAC |
| | | | | GCGCTGCTCACGGCTGTCG |
| | | | | TCATCTTTTCTGACCGGCCA |
| | | | | GGGTTGGAGCAGCCGCAAC |
| | | | | TGGTGGAAGAGATCCAGCG |
| | | | | GTACTACCTGAATACGCTCC |
| | | | | GCATCTATATCCTGAACCAG |
| | | | | CTGAGCGGGTCGGCGCGTT |
| | | | | CGTCCGTCATATACGGCAA |
| | | | | GATCCTCTCAATCCTCTCTG |
| | | | | AGCTACGCACGCTCGGCAT |
| | | | | GCAAAACTCCAACATGTGC |
| | | | | ATCTCCCTCAAGCTCAAGAA |
| | | | | CAGAAAGCTGCCGCCTTTCC |
| | | | | TCGAGGAGATCTGGGATGT |
| | | | | GGCGGACATGTCGCACACC |
| | | | | CAACCGCCGCCTATCCTCGA |
| | | | | GTCCCCCACGAATCTCTAG |
| GAL4-Linker- | 646 | MKLLSSIEQACDICRLKKLKCSKEKP | 647 | ATGAAGCTGCTGAGCAGCA |
| EcR | | KCAKCLKNNWECRYSPKTKRSPLTR | | TCGAGCAGGCTTGCGACAT |
| | | AHLTEVESRLERLEQLFLLIFPREDLD | | CTGCAGGCTGAAGAAGCTG |
| | | MILKMDSLQDIKALLTGLFVQDNV | | AAGTGCAGCAAGGAGAAG |
| | | NKDAVTDRLASVETDMPLTLRQHR | | CCCAAGTGCGCCAAGTGCC |
| | | ISATSSSEESSNKGQRQLTVSPEFPG | | TGAAGAACAACTGGGAGTG |
| | | RPECVVPETQCAMKRKEKKAQKEK | | CAGATACAGCCCCAAGACC |
| | | DKLPVSTTTVDDHMPPIMQCEPPP | | AAGAGGAGCCCCCTGACCA |
| | | PEAARIHEVVPRFLSDKLLVTNRQK | | GGGCCCACCTGACCGAGGT |
| | | NIPQLTANQQFLIARLIWYQDGYE | | GGAGAGCAGGCTGGAGAG |
| | | QPSDEDLKRITQTWQQADDENEE | | GCTGGAGCAGCTGTTCCTG |
| | | SDTPFRQITEMTILTVQLIVEFAKGL | | CTGATCTTCCCCAGGGAGG |
| | | PGFAKISQPDQITLLKACSSEVMML | | ACCTGGACATGATCCTGAA |
| | | RVARRYDAASDSILFANNQAYTRD | | GATGGACAGCCTGCAAGAC |
| | | NYRKAGMAEVIEDLLHFCRCMYS | | ATCAAGGCCCTGCTGACCG |
| | | MALDNIHYALLTAVVIFSDRPGLEQ | | GCCTGTTCGTGCAGGACAA |
| | | PQLVEEIQRYYLNTLRIYILNQLSGS | | CGTGAACAAGGACGCCGTG |
| | | ARSSVIYGKILSILSELRTLGMQNSN | | ACCGACAGGCTGGCCAGCG |
| | | MCISLKLKNRKLPPFLEEIWDVAD | | TGGAGACCGACATGCCCCT |
| | | MSHTQPPPILESPTNL | | GACCCTGAGGCAGCACAGG |
| | | | | ATCAGCGCCACCAGCAGCA |
| | | | | GCGAGGAGAGCAGCAACA |
| | | | | AGGGCCAGAGGCAGCTGAC |
| | | | | CGTGAGCCCCGAGTTTCCC |
| | | | | GGGCGGCCTGAGTGCGTAG |
| | | | | TACCCGAGACTCAGTGCGC |
| | | | | CATGAAGCGGAAAGAGAA |
| | | | | GAAAGCACAGAAGGAGAA |
| | | | | GGACAAACTGCCTGTCAGC |
| | | | | ACGACGACGGTGGACGACC |
| | | | | ACATGCCGCCCATTATGCAG |
| | | | | TGTGAACCTCCACCTCCTGA |
| | | | | AGCAGCAAGGATTCACGAA |
| | | | | GTGGTCCCAAGGTTTCTCTC |
| | | | | CGACAAGCTGTTGGTGACA |
| | | | | AACCGGCAGAAAAACATCC |
| | | | | CCCAGTTGACAGCCAACCA |
| | | | | GCAGTTCCTTATCGCCAGGC |
| | | | | TCATCTGGTACCAGGACGG |
| | | | | GTACGAGCAGCCTTCTGAT |
| | | | | GAAGATTTGAAGAGGATTA |
| | | | | CGCAGACGTGGCAGCAAGC |
| | | | | GGACGATGAAAACGAAGA |
| | | | | GTCGGACACTCCCTTCCGCC |
| | | | | AGATCACAGAGATGACTAT |
| | | | | CCTCACGGTCCAACTTATCG |
| | | | | TGGAGTTCGCGAAGGGATT |
| | | | | GCCAGGGTTCGCCAAGATC |
| | | | | TCGCAGCCTGATCAAATTAC |
| | | | | GCTGCTTAAGGCTTGCTCAA |
| | | | | GTGAGGTAATGATGCTCCG |
| | | | | AGTCGCGCGACGATACGAT |
| | | | | GCGGCCTCAGACAGTATTC |
| | | | | TGTTCGCGAACAACCAAGC |
| | | | | GTACACTCGCGACAACTACC |
| | | | | GCAAGGCTGGCATGGCCGA |
| | | | | GGTCATCGAGGATCTACTG |
| | | | | CACTTCTGCCGGTGCATGTA |
| | | | | CTCTATGGCGTTGGACAAC |
| | | | | ATCCATTACGCGCTGCTCAC |
| | | | | GGCTGTCGTCATCTTTTCTG |
| | | | | ACCGGCCAGGGTTGGAGCA |
| | | | | GCCGCAACTGGTGGAAGAG |
| | | | | ATCCAGCGGTACTACCTGA |
| | | | | ATACGCTCCGCATCTATATC |
| | | | | CTGAACCAGCTGAGCGGGT |
| | | | | CGGCGCGTTCGTCCGTCAT |
| | | | | ATACGGCAAGATCCTCTCAA |
| | | | | TCCTCTCTGAGCTACGCACG |
| | | | | CTCGGCATGCAAAACTCCA |
| | | | | ACATGTGCATCTCCCTCAAG |
| | | | | CTCAAGAACAGAAAGCTGC |
| | | | | CGCCTTTCCTCGAGGAGATC |
| | | | | TGGGATGTGGCGGACATGT |
| | | | | CGCACACCCAACCGCCGCCT |
| | | | | ATCCTCGAGTCCCCCACGAA |
| | | | | TCTCTAG |
| EMCV IRES | | | 702 | CCCCCTCTCCCTCCCCCCCCC |
| | | | | CTAACGTTACTGGCCGAAG |
| | | | | CCGCTTGGAATAAGGCCGG |
| | | | | TGTGCGTTTGTCTATATGTT |
| | | | | ATTTTCCACCATATTGCCGT |
| | | | | CTTTTGGCAATGTGAGGGC |
| | | | | CCGGAAACCTGGCCCTGTC |
| | | | | TTCTTGACGAGCATTCCTAG |
| | | | | GGGTCTTTCCCCTCTCGCCA |
| | | | | AAGGAATGCAAGGTCTGTT |
| | | | | GAATGTCGTGAAGGAAGCA |
| | | | | GTTCCTCTGGAAGCTTCTTG |
| | | | | AAGACAAACAACGTCTGTA |
| | | | | GCGACCCTTTGCAGGCAGC |
| | | | | GGAACCCCCCACCTGGCGA |
| | | | | CAGGTGCCTCTGCGGCCAA |
| | | | | AAGCCACGTGTATAAGATA |
| | | | | CACCTGCAAAGGCGGCACA |
| | | | | ACCCCAGTGCCACGTTGTG |
| | | | | AGTTGGATAGTTGTGGAAA |
| | | | | GAGTCAAATGGCTCTCCTCA |
| | | | | AGCGTATTCAACAAGGGGC |
| | | | | TGAAGGATGCCCAGAAGGT |
| | | | | ACCCCATTGTATGGGATCTG |
| | | | | ATCTGGGGCCTCGGTGCAC |
| | | | | ATGCTTTACATGTGTTTAGT |
| | | | | CGAGGTTAAAAAACGTCTA |
| | | | | GGCCCCCCGAACCACGGGG |
| | | | | ACGTGGTTTTCCTTTGAAAA |
| | | | | ACACGATC |
| 2xRbm3 IRES | | | 703 | ACTAGTTTTATAATTTCTTCT |
| | | | | TCCAGAATTTCTGACATTTT |
| | | | | ATAATTTCTTCTTCCAGAAG |
| | | | | ACTCACAACCTC |

The application's sequence listing, which the Patent Office published only in electronic form, follows.

SEQUENCE LISTING (729 sequences)

SEQ ID NO: 1 - DNA, 82 bp, Artificial Sequence
  Description of Artificial Sequence: Synthetic oligonucleotide
aggagggtgggggtggaggcaagcagaggacttcctgatcgcgtacccatggctacagtctttcttcatgtgactcgtggac

SEQ ID NO: 2 - DNA, 15 bp, Artificial Sequence
  Description of Artificial Sequence: Synthetic oligonucleotide
gagaatatatgaagg

SEQ ID NO: 3 - DNA, 70 bp, Artificial Sequence
  Description of Artificial Sequence: Synthetic oligonucleotide
gttcaattgtcatcactggcatcttttttgatcattgcaccatcatcaaatgcattgggataaccatgac

SEQ ID NO: 4 - DNA, 62 bp, Artificial Sequence
  Description of Artificial Sequence: Synthetic oligonucleotide
gatgctacaagtggcccacttctgagatgcgggctgcttctggatgacactgcttcccgagg

SEQ ID NO: 5 - DNA, 17 bp, Artificial Sequence
  Description of Artificial Sequence: Synthetic oligonucleotide
tatggattactttgcta

SEQ ID NO: 6 - DNA, 62 bp, Artificial Sequence
  Description of Artificial Sequence: Synthetic oligonucleotide
tttcggcaagtgcctcctcgctggccccagggtaccacccggagcacaggtttggtgacctt

SEQ ID NO: 7 - DNA, 63 bp, Artificial Sequence
  Description of Artificial Sequence: Synthetic oligonucleotide
ttagcaggaaaaaagagaacatcaccttgtaaaactgaagattgtgaccagtcagaataatgt

SEQ ID NO: 8 - DNA, 12 bp, Artificial Sequence
  Description of Artificial Sequence: Synthetic oligonucleotide
tgatatgtgcat

SEQ ID NO: 9 - DNA, 64 bp, Artificial Sequence
  Description of Artificial Sequence: Synthetic oligonucleotide
gcattatggtgacagctgcctcgggaagccaagttgggctttaaagtgcagggcctgctgatgt

SEQ ID NO: 10 - DNA, 74 bp, Artificial Sequence
  Description of Artificial Sequence: Synthetic oligonucleotide
agggactgggcccacggggaggcagcgtccccgaggcagcagcggcagcggcggctcctctccccatggccctg

SEQ ID NO: 11 - DNA, 10 bp, Artificial Sequence
  Description of Artificial Sequence: Synthetic oligonucleotide
ctgggctcag

SEQ ID NO: 12 - DNA, 79 bp, Artificial Sequence
  Description of Artificial Sequence: Synthetic oligonucleotide
cagggacctggggaccccggcaccggcaggccccaaggggtgaggtgagcgggcattgggacctcccctccctgtactc

SEQ ID NO: 13 - DNA, 71 bp, Artificial Sequence
  Description of Artificial Sequence: Synthetic oligonucleotide
agggactgggcccacggggaggcagcgtccccgaggcagcagcggcagcggcggctcctctccccatggcc

SEQ ID NO: 14 - DNA, 15 bp, Artificial Sequence
  Description of Artificial Sequence: Synthetic oligonucleotide
tgctgggctcagacc

SEQ ID NO: 15 - DNA, 76 bp, Artificial Sequence
  Description of Artificial Sequence: Synthetic oligonucleotide
ggacctggggaccccggcaccggcaggccccaaggggtgaggtgagcgggcattgggacctcccctccctgtactc

SEQ ID NO: 16 - DNA, 63 bp, Artificial Sequence
  Description of Artificial Sequence: Synthetic oligonucleotide
cttctgaagaaaatatatttctttttattcatagctcttatgatagcaatgtcagcagtgcct

SEQ ID NO: 17 - DNA, 20 bp, Artificial Sequence
  Description of Artificial Sequence: Synthetic oligonucleotide
ttaagattctaaaattatct

SEQ ID NO: 18 - DNA, 63 bp, Artificial Sequence
  Description of Artificial Sequence: Synthetic oligonucleotide
aagtaaggttgaccatactctacagttgtgttttaatgtatattaatgttactaatgtgtttt

SEQ ID NO: 19 - DNA, 55 bp, Artificial Sequence
  Description of Artificial Sequence: Synthetic oligonucleotide
caggttaacccaacagaaggctaaagaaggtatattgctgttgacagtgagcgac

SEQ ID NO: 20 - DNA, 19 bp, Artificial Sequence
  Description of Artificial Sequence: Synthetic oligonucleotide
ctgtgaagccacagatggg

SEQ ID NO: 21 - DNA, 53 bp, Artificial Sequence
  Description of Artificial Sequence: Synthetic oligonucleotide
tgcctactgcctcggacttcaaggggctactttaggagcaattatcttgttta

SEQ ID NO: 22 - DNA, 62 bp, Artificial Sequence
  Description of Artificial Sequence: Synthetic oligonucleotide
ccggggtcctgtctgcatccagcgcagcattctggaagacgccacgcctccgctggcgacgg

SEQ ID NO: 23 - DNA, 16 bp, Artificial Sequence
  Description of Artificial Sequence: Synthetic oligonucleotide
ctgtgacacttcaaac

SEQ ID NO: 24 - DNA, 62 bp, Artificial Sequence
  Description of Artificial Sequence: Synthetic oligonucleotide
ccgtccacggcaccgcatcgaaaacgccgctgagacctcagccttgacctccctcagcgtgg

SEQ ID NO: 25 - DNA, 64 bp, Artificial Sequence
  Description of Artificial Sequence: Synthetic oligonucleotide
caatggtggaatgtggaggtgaagttaacaccttcgtggctacagagtttccttagcagagctg

SEQ ID NO: 26 - DNA, 12 bp, Artificial Sequence
  Description of Artificial Sequence: Synthetic oligonucleotide
tgtctaaactat

SEQ ID NO: 27 - DNA, 92 bp, Artificial Sequence
  Description of Artificial Sequence: Synthetic oligonucleotide
tagctactgctaggcaatccttccctcgataaatgtcttggcatcgtttgctttgagcaagaaggttcatctgatatcagtcttctcaatct

SEQ ID NO: 28 - DNA, 77 bp, Artificial Sequence
  Description of Artificial Sequence: Synthetic oligonucleotide
acaggctgattgtatctgtctatgagcaaaggaaacctgaaggaaccaagggcctggctggacagagttgtcatgtg

SEQ ID NO: 29 - DNA, 21 bp, Artificial Sequence
  Description of Artificial Sequence: Synthetic oligonucleotide
gcagaacatccgctcacctgt

SEQ ID NO: 30 - DNA, 68 bp, Artificial Sequence
  Description of Artificial Sequence: Synthetic oligonucleotide
cacatgacaacccagcctgaatgacaaccagccattgaaagaaagcagccctcacaccatagcatcta

SEQ ID NO: 31 - DNA, 79 bp, Artificial Sequence
  Description of Artificial Sequence: Synthetic oligonucleotide
acaggctgattgtatctgtctatgagcaaaggaaacctgaaggaaccaagggcctggctggacagagttgtcatgtgtc

SEQ ID NO: 32 - DNA, 17 bp, Artificial Sequence
  Description of Artificial Sequence: Synthetic oligonucleotide
agaacatccgctcacct

SEQ ID NO: 33 - DNA, 68 bp, Artificial Sequence; identical to SEQ ID NO: 30
  Description of Artificial Sequence: Synthetic oligonucleotide

SEQ ID NO: 34 - DNA, 57 bp, Artificial Sequence
  Description of Artificial Sequence: Synthetic oligonucleotide
gggtttattgtaagagagcattatgaagaaaaaaatagatcataaagcttcttcagg

SEQ ID NO: 35 - DNA, 19 bp, Artificial Sequence
  Description of Artificial Sequence: Synthetic oligonucleotide
gatttaaatagtgattgtc

SEQ ID NO: 36 - DNA, 58 bp, Artificial Sequence
  Description of Artificial Sequence: Synthetic oligonucleotide
cttgggggagaccagctgcgctgcactaccaacagcaaaagaagtgaatgggacagct

SEQ ID NO: 37 - DNA, 59 bp, Artificial Sequence
  Description of Artificial Sequence: Synthetic oligonucleotide
gggtttattgtaagagagcattatgaagaaaaaaatagatcataaagcttcttcaggaa

SEQ ID NO: 38 - DNA, 15 bp, Artificial Sequence
  Description of Artificial Sequence: Synthetic oligonucleotide
tttaaatagtgattg

SEQ ID NO: 39 - DNA, 61 bp, Artificial Sequence
  Description of Artificial Sequence: Synthetic oligonucleotide
gttcttgggggagaccagctgcgctgcactaccaacagcaaaagaagtgaatgggacagct

SEQ ID NO: 40 - DNA, 64 bp, Artificial Sequence
  Description of Artificial Sequence: Synthetic oligonucleotide
tttaccaatgaaaagcatttaactgttttggattccaaactagcagcactacaatgctttgcta

SEQ ID NO: 41 - DNA, 16 bp, Artificial Sequence
  Description of Artificial Sequence: Synthetic oligonucleotide
tcgcctcttcaatgga

SEQ ID NO: 42 - DNA, 64 bp, Artificial Sequence
  Description of Artificial Sequence: Synthetic oligonucleotide
tagctatgcattgattactacgggacaaccaacgttttcatttgtgaatatcaattacttgcca

SEQ ID NO: 43 - DNA, 58 bp, Artificial Sequence
  Description of Artificial Sequence: Synthetic oligonucleotide
tgaagccacaggagccaagagcaggaggaccaaggccctggcgaaggccgtggcctcg

SEQ ID NO: 44 - DNA, 15 bp, Artificial Sequence
  Description of Artificial Sequence: Synthetic oligonucleotide
gtgcaggtcccaatg

SEQ ID NO: 45 - DNA, 59 bp, Artificial Sequence
  Description of Artificial Sequence: Synthetic oligonucleotide
cggggacgcgggcctggacgccggcatccgggctcaggacccccctctctgccagaggc

SEQ ID NO: 46 - DNA, 68 bp, Artificial Sequence
  Description of Artificial Sequence: Synthetic oligonucleotide
gtcttggaggctggggcacctcggggaaggacgccggcatcagcaccattctggggtacggggatgga

SEQ ID NO: 47 - DNA, 6 bp, Artificial Sequence
  Description of Artificial Sequence: Synthetic oligonucleotide
gtttct

SEQ ID NO: 48 - DNA, 70 bp, Artificial Sequence
  Description of Artificial Sequence: Synthetic oligonucleotide
gccgtccgtatccgctgcagcctgtggggcctgcgggccggggagccgatcgcgcttcagctcagcgcct

SEQ ID NO: 49 - DNA, 61 bp, Artificial Sequence
  Description of Artificial Sequence: Synthetic oligonucleotide
ccaataattcaagccaagcaagtatataggtgttttaatagtttttgtttgcagtcctctg

SEQ ID NO: 50 - DNA, 17 bp, Artificial Sequence
  Description of Artificial Sequence: Synthetic oligonucleotide
tacaagaagaatgtagt

SEQ ID NO: 51 - DNA, 61 bp, Artificial Sequence
  Description of Artificial Sequence: Synthetic oligonucleotide
tggtggcctgctatttccttcaaatgaatgatttttactaattttgtgtacttttattgtg

SEQ ID NO: 52 - DNA, 57 bp, Artificial Sequence
  Description of Artificial Sequence: Synthetic oligonucleotide
tgtctgcttgttttgcctaccatcgtgacatctccatggctgtaccaccttgtcggg

SEQ ID NO: 53 - DNA, 16 bp, Artificial Sequence
  Description of Artificial Sequence: Synthetic oligonucleotide
ctgttgaatctcatgg

SEQ ID NO: 54 - DNA, 57 bp, Artificial Sequence
  Description of Artificial Sequence: Synthetic oligonucleotide
tctgacattttggtatctttcatctgaccatccatatccaatgttctcatttaaaca

SEQ ID NO: 55 - DNA, 65 bp, Artificial Sequence
  Description of Artificial Sequence: Synthetic oligonucleotide
ggagtcaggaggcctgggcagcctgaagagtacacgccgacggacagacagacagtgcagtcacc

SEQ ID NO: 56 - DNA, 15 bp, Artificial Sequence
  Description of Artificial Sequence: Synthetic oligonucleotide
aacagcactggaggg

SEQ ID NO: 57 - DNA, 65 bp, Artificial Sequence
  Description of Artificial Sequence: Synthetic oligonucleotide
gatgagtgtactgtgggcttcggagatcacgccactgctgccgcccgctgcccgccaccatcttc

SEQ ID NO: 58 - DNA, 63 bp, Artificial Sequence
  Description of Artificial Sequence: Synthetic oligonucleotide
cagttctgttttgattttttttgtttgttttttgatcagtgctaatcttcgatactcgaagga

SEQ ID NO: 59 - DNA, 13 bp, Artificial Sequence
  Description of Artificial Sequence: Synthetic oligonucleotide
tctttatttatga

SEQ ID NO: 60 - DNA, 62 bp, Artificial Sequence
  Description of Artificial Sequence: Synthetic oligonucleotide
ttttttagtatcaaatcccaccctggaggcacttcctgttcctgatgcagccttcagggagg

SEQ ID NO: 61 - DNA, 61 bp, Artificial Sequence
  Description of Artificial Sequence: Synthetic oligonucleotide
cggaccacggtgtccccttctctccagctgggggtctcgggtcctggcgctgagaggccgc

SEQ ID NO: 62 - DNA, 11 bp, Artificial Sequence
  Description of Artificial Sequence: Synthetic oligonucleotide
gtgcacccgtg

SEQ ID NO: 63 - DNA, 63 bp, Artificial Sequence
  Description of Artificial Sequence: Synthetic oligonucleotide
gcggccctagcgacctgcggcggcgccgggaaagccctgcctctgcagcgggtcccaggggtc

SEQ ID NO: 64 - DNA, 22 bp, Artificial Sequence
  Description of Artificial Sequence: Synthetic oligonucleotide
aatatagtcttctccctcgctt

SEQ ID NO: 65 - DNA, 21 bp, Artificial Sequence
  Description of Artificial Sequence: Synthetic oligonucleotide
aagcagggacaggactatatt

SEQ ID NO: 66 - DNA, 22 bp, Artificial Sequence
  Description of Artificial Sequence: Synthetic oligonucleotide
aatatagtcttctccctcgctt

SEQ ID NO: 67 - DNA, 22 bp, Artificial Sequence
  Description of Artificial Sequence: Synthetic oligonucleotide
gagcgagggataggactatact

SEQ ID NO: 68 - DNA, 22 bp, Artificial Sequence
  Description of Artificial Sequence: Synthetic oligonucleotide
aatatagtcttctccctcgctg

SEQ ID NO: 69 - DNA, 20 bp, Artificial Sequence
  Description of Artificial Sequence: Synthetic oligonucleotide
cagtgagggaagactatgtt

SEQ ID NO: 70 - DNA, 22 bp, Artificial Sequence
  Description of Artificial Sequence: Synthetic oligonucleotide
aatatagtcttctccctcgctg

SEQ ID NO: 71 - DNA, 23 bp, Artificial Sequence
  Description of Artificial Sequence: Synthetic oligonucleotide
cagcgagggagaagattaccatt

SEQ ID NO: 72 - DNA, 22 bp, Artificial Sequence
  Description of Artificial Sequence: Synthetic oligonucleotide
ttcaggaatgggttccaaggat

SEQ ID NO: 73 - DNA, 21 bp, Artificial Sequence
  Description of Artificial Sequence: Synthetic oligonucleotide
atcctggaagctattcctgac

SEQ ID NO: 74 - DNA, 22 bp, Artificial Sequence
  Description of Artificial Sequence: Synthetic oligonucleotide
tataatataatagaaccacagg

SEQ ID NO: 75 - DNA, 23 bp, Artificial Sequence
  Description of Artificial Sequence: Synthetic oligonucleotide
cctgtggttctgttatatccata

SEQ ID NO: 76 - DNA, 22 bp, Artificial Sequence
  Description of Artificial Sequence: Synthetic oligonucleotide
ttcaggaatgggttccaaggag

SEQ ID NO: 77 - DNA, 20 bp, Artificial Sequence
  Description of Artificial Sequence: Synthetic oligonucleotide
ctccttggaccattcctgaa

SEQ ID NO: 78 - DNA, 24 bp, Artificial Sequence
  Description of Artificial Sequence: Synthetic oligonucleotide
ttcaggaatgggttccaaggaatt

SEQ ID NO: 79 - DNA, 23 bp, Artificial Sequence
  Description of Artificial Sequence: Synthetic oligonucleotide
aatgtcctgaagccattcatgga

SEQ ID NO: 80 - DNA, 22 bp, Artificial Sequence
  Description of Artificial Sequence: Synthetic oligonucleotide
ttcaggaatgggttccaaggag

SEQ ID NO: 81 - DNA, 22 bp, Artificial Sequence
  Description of Artificial Sequence: Synthetic oligonucleotide
ctccttggaacacattcctaca

SEQ ID NO: 82 - DNA, 23 bp, Artificial Sequence
  Description of Artificial Sequence: Synthetic oligonucleotide
ttcaggaatgggttccaaggaag

SEQ ID NO: 83 - DNA, 24 bp, Artificial Sequence
  Description of Artificial Sequence: Synthetic oligonucleotide
cttcttggtacacgttcctgctca

SEQ ID NO: 84 - skipped

SEQ ID NO: 85 - DNA, 22 bp, Artificial Sequence
  Description of Artificial Sequence: Synthetic oligonucleotide
acgtgtggtttatcctgttgta

SEQ ID NO: 86 - skipped

SEQ ID NO: 87 - DNA, 26 bp, Artificial Sequence
  Description of Artificial Sequence: Synthetic oligonucleotide
ccagcttgtggttctattatgttata

SEQ ID NO: 88 - DNA, 22 bp, Artificial Sequence
  Description of Artificial Sequence: Synthetic oligonucleotide
agatccacgttactcaccctag

SEQ ID NO: 89 - DNA, 23 bp, Artificial Sequence
  Description of Artificial Sequence: Synthetic oligonucleotide
ctagggtgtgtcatgtggatgaa

SEQ ID NO: 90 - DNA, 22 bp, Artificial Sequence
  Description of Artificial Sequence: Synthetic oligonucleotide
agatccacgttactcacccgtg

SEQ ID NO: 91 - DNA, 22 bp, Artificial Sequence
  Description of Artificial Sequence: Synthetic oligonucleotide
acccgggtgataatatggatct

SEQ ID NO: 92 - DNA, 22 bp, Artificial Sequence
  Description of Artificial Sequence: Synthetic oligonucleotide
agatccacgttactcaccccct

SEQ ID NO: 93 - DNA, 21 bp, Artificial Sequence
  Description of Artificial Sequence: Synthetic oligonucleotide
aggggtgagaagcgtggatcc

SEQ ID NO: 94 - DNA, 22 bp, Artificial Sequence
  Description of Artificial Sequence: Synthetic oligonucleotide
agatccacgttactcaccctta

SEQ ID NO: 95 - DNA, 23 bp, Artificial Sequence
  Description of Artificial Sequence: Synthetic oligonucleotide
taggtgagttacgtggatctgtt

SEQ ID NO: 96 - DNA, 22 bp, Artificial Sequence
  Description of Artificial Sequence: Synthetic oligonucleotide
agatccacgttactcaccctgc

SEQ ID NO: 97 - DNA, 22 bp, Artificial Sequence
  Description of Artificial Sequence: Synthetic oligonucleotide
gtagggtgagactcgtggatct

SEQ ID NO: 98 - DNA, 22 bp, Artificial Sequence
  Description of Artificial Sequence: Synthetic oligonucleotide
accacgatgactgctgtgcaga

SEQ ID NO: 99 - DNA, 23 bp, Artificial Sequence
  Description of Artificial Sequence: Synthetic oligonucleotide
tctgcgtagcagtcatcgccggt

SEQ ID NO: 100 - DNA, 22 bp, Artificial Sequence
  Description of Artificial Sequence: Synthetic oligonucleotide
accacgatgactgctgtgcaga

SEQ ID NO: 101 - DNA, 21 bp, Artificial Sequence
  Description of Artificial Sequence: Synthetic oligonucleotide
tctgatggccgtcatcgtggc

SEQ ID NO: 102 - DNA, 22 bp, Artificial Sequence
  Description of Artificial Sequence: Synthetic oligonucleotide
accacgatgactgctgtgcaga

SEQ ID NO: 103 - DNA, 22 bp, Artificial Sequence
  Description of Artificial Sequence: Synthetic oligonucleotide
tctgtacagcagcatcgatggt

SEQ ID NO: 104 - DNA, 22 bp, Artificial Sequence
  Description of Artificial Sequence: Synthetic oligonucleotide
accacgatgactgctgtgcaga

SEQ ID NO: 105 - DNA, 21 bp, Artificial Sequence
  Description of Artificial Sequence: Synthetic oligonucleotide
tgcgcagctgttcatcgtggt

SEQ ID NO: 106 - DNA, 22 bp, Artificial Sequence
  Description of Artificial Sequence: Synthetic oligonucleotide
accacgatgactgctgtgcaga

SEQ ID NO: 107 - DNA, 20 bp, Artificial Sequence
  Description of Artificial Sequence: Synthetic oligonucleotide
ctgcgaagcagcatcgtggc

SEQ ID NO: 108 - DNA, 22 bp, Artificial Sequence
  Description of Artificial Sequence: Synthetic oligonucleotide
accacgatgactgctgtgcaga

SEQ ID NO: 109 - DNA, 21 bp, Artificial Sequence
  Description of Artificial Sequence: Synthetic oligonucleotide
tctgcaacgcagtctcgctgg

SEQ ID NO: 110 - DNA, 22 bp, Artificial Sequence
  Description of Artificial Sequence: Synthetic oligonucleotide
accacgatgactgctgtgcaga

SEQ ID NO: 111 - DNA, 22 bp, Artificial Sequence
  Description of Artificial Sequence: Synthetic oligonucleotide
gatgcacagcaatcatcgtggt

SEQ ID NO: 112 - DNA, 23 bp, Artificial Sequence
  Description of Artificial Sequence: Synthetic oligonucleotide
accacgatgactgctgtgcagat

SEQ ID NO: 113 - DNA, 20 bp, Artificial Sequence
  Description of Artificial Sequence: Synthetic oligonucleotide
atctgcacagcagttcgtgg

SEQ ID NO: 114 - DNA, 22 bp, Artificial Sequence
  Description of Artificial Sequence: Synthetic oligonucleotide
accacgatgactgctgtgcaga

SEQ ID NO: 115 - DNA, 23 bp, Artificial Sequence
  Description of Artificial Sequence: Synthetic oligonucleotide
tctgccaatagctgtaatcgtgg

SEQ ID NO: 116 - DNA, 22 bp, Artificial Sequence
  Description of Artificial Sequence: Synthetic oligonucleotide
tatcgttcacggtcagcgactg

SEQ ID NO: 117 - DNA, 23 bp, Artificial Sequence
  Description of Artificial Sequence: Synthetic oligonucleotide
cagtcgttgactgtggacttata

SEQ ID NO: 118 - DNA, 22 bp, Artificial Sequence
  Description of Artificial Sequence: Synthetic oligonucleotide
tatcgttcacggtcagcgactg

SEQ ID NO: 119 - DNA, 21 bp, Artificial Sequence
  Description of Artificial Sequence: Synthetic oligonucleotide
cagtgctgaacgtgaacgatc

SEQ ID NO: 120 - DNA, 22 bp, Artificial Sequence
  Description of Artificial Sequence: Synthetic oligonucleotide
tatcgttcacggtcagcgactg

SEQ ID NO: 121 - DNA, 22 bp, Artificial Sequence
  Description of Artificial Sequence: Synthetic oligonucleotide
tagtcgctgacttgaacagata

SEQ ID NO: 122 - DNA, 21 bp, Artificial Sequence
  Description of Artificial Sequence: Synthetic oligonucleotide
tatcgttcacggtcagcgact

SEQ ID NO: 123 - DNA, 21 bp, Artificial Sequence
  Description of Artificial Sequence: Synthetic oligonucleotide
tgtcgctgacagtgaacgata

SEQ ID NO: 124 - DNA, 22 bp, Artificial Sequence
  Description of Artificial Sequence: Synthetic oligonucleotide
tatcgttcacggtcagcgactg

SEQ ID NO: 125 - DNA, 21 bp, Artificial Sequence
  Description of Artificial Sequence: Synthetic oligonucleotide
gtcgctgagcgctgaacgatg

SEQ ID NO: 126 - DNA, 22 bp, Artificial Sequence
  Description of Artificial Sequence: Synthetic oligonucleotide
taactcaggacattgaagtagt

SEQ ID NO: 127 - DNA, 23 bp, Artificial Sequence
  Description of Artificial Sequence: Synthetic oligonucleotide
actacttcaatgtcctgacctta

SEQ ID NO: 128 - DNA, 22 bp, Artificial Sequence
  Description of Artificial Sequence: Synthetic oligonucleotide
taactcaggacattgaagtagt

SEQ ID NO: 129 - DNA, 21 bp, Artificial Sequence
  Description of Artificial Sequence: Synthetic oligonucleotide
actattcagagtcctgagttc

SEQ ID NO: 130 - DNA, 22 bp, Artificial Sequence
  Description of Artificial Sequence: Synthetic oligonucleotide
taactcaggacattgaagtagt

SEQ ID NO: 131 - DNA, 20 bp, Artificial Sequence
  Description of Artificial Sequence: Synthetic oligonucleotide
ctactccaatgcctgagttg

SEQ ID NO: 132 - DNA, 22 bp, Artificial Sequence
  Description of Artificial Sequence: Synthetic oligonucleotide
taactcaggacattgaagtagt

SEQ ID NO: 133 - DNA, 21 bp, Artificial Sequence
  Description of Artificial Sequence: Synthetic oligonucleotide
actactgtaatgtctgacgtt

SEQ ID NO: 134 - DNA, 23 bp, Artificial Sequence
  Description of Artificial Sequence: Synthetic oligonucleotide
taactcaggacattgaagtagtc

SEQ ID NO: 135 - DNA, 20 bp, Artificial Sequence
  Description of Artificial Sequence: Synthetic oligonucleotide
gactacttcaatgttgagtt

SEQ ID NO: 136 - DNA, 22 bp, Artificial Sequence
  Description of Artificial Sequence: Synthetic oligonucleotide
agatccacgttactcaccctag

SEQ ID NO: 137 - DNA, 23 bp, Artificial Sequence
  Description of Artificial Sequence: Synthetic oligonucleotide
ctaggcagtgagcaaagtggatc

SEQ ID NO: 138 - DNA, 22 bp, Artificial Sequence
  Description of Artificial Sequence: Synthetic oligonucleotide
agatccacgttactcaccctag

SEQ ID NO: 139 - DNA, 21 bp, Artificial Sequence
  Description of Artificial Sequence: Synthetic oligonucleotide
ctaggtgagaaacgtggatcg

SEQ ID NO: 140 - DNA, 22 bp, Artificial Sequence
  Description of Artificial Sequence: Synthetic oligonucleotide
agatccacgttactcaccctag

SEQ ID NO: 141 - DNA, 23 bp, Artificial Sequence
  Description of Artificial Sequence: Synthetic oligonucleotide
ctagggtgagtaacgtggcctct

SEQ ID NO: 142 - DNA, 22 bp, Artificial Sequence
  Description of Artificial Sequence: Synthetic oligonucleotide
agatccacgttactcaccctag

SEQ ID NO: 143 - DNA, 20 bp, Artificial Sequence
  Description of Artificial Sequence: Synthetic oligonucleotide
tagggcgagtacgtggatcg

SEQ ID NO: 144 - DNA, 22 bp, Artificial Sequence
  Description of Artificial Sequence: Synthetic oligonucleotide
agatccacgttactcaccctag

SEQ ID NO: 145 - DNA, 22 bp, Artificial Sequence
  Description of Artificial Sequence: Synthetic oligonucleotide
ctagggtgagtacgtggcatct

SEQ ID NO: 146 - DNA, 22 bp, Artificial Sequence
  Description of Artificial Sequence: Synthetic oligonucleotide
cattatgcctgggatttggatc

SEQ ID NO: 147 - DNA, 21 bp, Artificial Sequence
  Description of Artificial Sequence: Synthetic oligonucleotide
gatcagatcgcaggcataatt

SEQ ID NO: 148 - DNA, 22 bp, Artificial Sequence
  Description of Artificial Sequence: Synthetic oligonucleotide
cattatgcctgggatttggatc

SEQ ID NO: 149 - DNA, 23 bp, Artificial Sequence
  Description of Artificial Sequence: Synthetic oligonucleotide
gatccggatcctaggtatccatg

SEQ ID NO: 150 - DNA, 23 bp, Artificial Sequence
  Description of Artificial Sequence: Synthetic oligonucleotide
cattatgcctgggatttggatcg

SEQ ID NO: 151 - DNA, 23 bp, Artificial Sequence
  Description of Artificial Sequence: Synthetic oligonucleotide
cggccagaaccaaggcataagta

SEQ ID NO: 152 - DNA, 22 bp, Artificial Sequence
  Description of Artificial Sequence: Synthetic oligonucleotide
cattatgcctgggatttggatc

SEQ ID NO: 153 - DNA, 23 bp, Artificial Sequence
  Description of Artificial Sequence: Synthetic oligonucleotide
actccaaatcccgtgcataatcg

SEQ ID NO: 154 - DNA, 22 bp, Artificial Sequence
  Description of Artificial Sequence: Synthetic oligonucleotide
cattatgcctgggatttggatc

SEQ ID NO: 155 - DNA, 22 bp, Artificial Sequence
  Description of Artificial Sequence: Synthetic oligonucleotide
gattcgaatccaaggcatatgg

SEQ ID NO: 156 - DNA, 22 bp, Artificial Sequence
  Description of Artificial Sequence: Synthetic oligonucleotide
taattcacatccctttcatcag

SEQ ID NO: 157 - DNA, 22 bp, Artificial Sequence
  Description of Artificial Sequence: Synthetic oligonucleotide
atgatgaaaggacagtgaatta

SEQ ID NO: 158 - DNA, 22 bp, Artificial Sequence
  Description of Artificial Sequence: Synthetic oligonucleotide
tagtcgttgggtaaagtcgcca

SEQ ID NO: 159 - DNA, 20 bp, Artificial Sequence
  Description of Artificial Sequence: Synthetic oligonucleotide
tggtgacttctcaacgatta

SEQ ID NO: 160 - DNA, 22 bp, Artificial Sequence
  Description of Artificial Sequence: Synthetic oligonucleotide
gttgctttccgctaagtggtga

SEQ ID NO: 161 - DNA, 22 bp, Artificial Sequence
  Description of Artificial Sequence: Synthetic oligonucleotide
tcaccacttagaggaaagcctc

SEQ ID NO: 162 - DNA, 22 bp, Artificial Sequence
  Description of Artificial Sequence: Synthetic oligonucleotide
tttgcagtggccttcgtggccc

SEQ ID NO: 163 - DNA, 23 bp, Artificial Sequence
  Description of Artificial Sequence: Synthetic oligonucleotide
gggctatgaaggccattgagaaa

SEQ ID NO: 164 - DNA, 23 bp, Artificial Sequence
  Description of Artificial Sequence: Synthetic oligonucleotide
agcctcccgtcctaagaccccac

SEQ ID NO: 165 - DNA, 24 bp, Artificial Sequence
  Description of Artificial Sequence: Synthetic oligonucleotide
gtgggtcttaggtcgggagctgct

SEQ ID NO: 166 - DNA, 22 bp, Artificial Sequence
  Description of Artificial Sequence: Synthetic oligonucleotide
tgaacgaccagtgtttaaccgg

SEQ ID NO: 167 - DNA, 23 bp, Artificial Sequence
  Description of Artificial Sequence: Synthetic oligonucleotide
ccggttgaacattggttgcctca

SEQ ID NO: 168 - DNA, 22 bp, Artificial Sequence
  Description of Artificial Sequence: Synthetic oligonucleotide
ttctccttggagttcatccgcg

SEQ ID NO: 169 - DNA, 18 bp, Artificial Sequence
  Description of Artificial Sequence: Synthetic oligonucleotide
atgaacttagaggagacg

SEQ ID NO: 170 - DNA, 22 bp, Artificial Sequence
  Description of Artificial Sequence: Synthetic oligonucleotide
ttctccttggagttcatccgcg

SEQ ID NO: 171 - DNA, 20 bp, Artificial Sequence
  Description of Artificial Sequence: Synthetic oligonucleotide
cgcggatgatccaaggagga

SEQ ID NO: 172-177 - skipped (6 entries)

SEQ ID NO: 178 - DNA, 210 bp, Artificial Sequence
  Description of Artificial Sequence: Synthetic polynucleotide
aggagggtgggggtggaggcaagcagaggacttcctgatcgcgtacccatggctacagtctttcttcatgtgactcgtggacaatatagtcttctccctcgcttgagaatatatgaaggaagcagggacaggactatattgttcaattgtcatcactggcatcttttttgatcattgcaccatcatcaaatgcattgggataaccatgac

SEQ ID NO: 179 - DNA, 210 bp, Artificial Sequence
  Description of Artificial Sequence: Synthetic polynucleotide
aggagggtgggggtggaggcaagcagaggacttcctgatcgcgtacccatggctacagtctttcttcatgtgactcgtggacttcaggaatgggttccaaggatgagaatatatgaaggatcctggaagctattcctgacgttcaattgtcatcactggcatcttttttgatcattgcaccatcatcaaatgcattgggataaccatgac

SEQ ID NO: 180 - DNA, 186 bp, Artificial Sequence
  Description of Artificial Sequence: Synthetic polynucleotide
gatgctacaagtggcccacttctgagatgcgggctgcttctggatgacactgcttcccgaggcctgtggttctgttatatccatatatggattactttgctatataatataatagaaccacaggtttcggcaagtgcctcctcgctggccccagggtaccacccggagcacaggtttggtgacctt

SEQ ID NO: 181 - DNA, 184 bp, Artificial Sequence
  Description of Artificial Sequence: Synthetic polynucleotide
ttagcaggaaaaaagagaacatcaccttgtaaaactgaagattgtgaccagtcagaataatgtagatccacgttactcaccctagtgatatgtgcatctagggtgtgtcatgtggatgaagcattatggtgacagctgcctcgggaagccaagttgggctttaaagtgcagggcctgctgatgt

SEQ ID NO: 182 - DNA, 207 bp, Artificial Sequence
  Description of Artificial Sequence: Synthetic polynucleotide
agggactgggcccacggggaggcagcgtccccgaggcagcagcggcagcggcggctcctctccccatggccctgagatccacgttactcacccgtgctgggctcagacccgggtgataatatggatctcagggacctggggaccccggcaccggcaggccccaaggggtgaggtgagcgggcattgggacctcccctccctgtactc

SEQ ID NO: 183 - DNA, 210 bp, Artificial Sequence
  Description of Artificial Sequence: Synthetic polynucleotide
aggagggtgggggtggaggcaagcagaggacttcctgatcgcgtacccatggctacagtctttcttcatgtgactcgtggacagatccacgttactcaccccctgagaatatatgaaggaggggtgagaagcgtggatccgttcaattgtcatcactggcatcttttttgatcattgcaccatcatcaaatgcattgggataaccatgac

SEQ ID NO: 184 - DNA, 186 bp, Artificial Sequence
  Description of Artificial Sequence: Synthetic polynucleotide
gatgctacaagtggcccacttctgagatgcgggctgcttctggatgacactgcttcccgaggtctgcgtagcagtcatcgccggttatggattactttgctaaccacgatgactgctgtgcagatttcggcaagtgcctcctcgctggccccagggtaccacccggagcacaggtttggtgacctt

SEQ ID NO: 185 - DNA, 210 bp, Artificial Sequence
  Description of Artificial Sequence: Synthetic polynucleotide
aggagggtgggggtggaggcaagcagaggacttcctgatcgcgtacccatggctacagtctttcttcatgtgactcgtggacaccacgatgactgctgtgcagagagaatatatgaaggtctgatggccgtcatcgtggcgttcaattgtcatcactggcatcttttttgatcattgcaccatcatcaaatgcattgggataaccatgac

SEQ ID NO: 186 - DNA, 185 bp, Artificial Sequence
  Description of Artificial Sequence: Synthetic polynucleotide
cattttccctccctttcccttaggagcctgttcctctcacgccctcacctggctgagccgcatctgtacagcagcatcgatggttatgtcctgacccagctaaccacgatgactgctgtgcagatgccctctgcccctggcttcgaggaggaggaggagctgctttccccatcatctggaaggtg

SEQ ID NO: 187 - DNA, 188 bp, Artificial Sequence
  Description of Artificial Sequence: Synthetic polynucleotide
cttctgaagaaaatatatttctttttattcatagctcttatgatagcaatgtcagcagtgcctaccacgatgactgctgtgcagattaagattctaaaattatcttgcgcagctgttcatcgtggtagtaaggttgaccatactctacagttgtgttttaatgtatattaatgttactaatgtgtttt

SEQ ID NO: 188 - DNA, 189 bp, Artificial Sequence
  Description of Artificial Sequence: Synthetic polynucleotide
cttctgaagaaaatatatttctttttattcatagctcttatgatagcaatgtcagcagtgcctaccacgatgactgctgtgcagattaagattctaaaattatcttgcgcagctgttcatcgtggtaagtaaggttgaccatactctacagttgtgttttaatgtatattaatgttactaatgtgtttt

SEQ ID NO: 189 - DNA, 172 bp, Artificial Sequence
  Description of Artificial Sequence: Synthetic polynucleotide
tgtctgcttgttttgcctaccatcgtgacatctccatggctgtaccaccttgtcgggaccacgatgactgctgtgcagactgttgaatctcatggctgcgaagcagcatcgtggctctgacattttggtatctttcatctgaccatccatatccaatgttctcatttaaaca

SEQ ID NO: 190 - DNA, 181 bp, Artificial Sequence
  Description of Artificial Sequence: Synthetic polynucleotide
cagttctgttttgattttttttgtttgttttttgatcagtgctaatcttcgatactcgaaggatctgcaacgcagtctcgctggtctttatttatgaaccacgatgactgctgtgcagattttttagtatcaaatcccaccctggaggcacttcctgttcctgatgcagccttcagggagg

SEQ ID NO: 191 - DNA, 187 bp, Artificial Sequence
  Description of Artificial Sequence: Synthetic polynucleotide
ggagtcaggaggcctgggcagcctgaagagtacacgccgacggacagacagacagtgcagtcaccaccacgatgactgctgtgcagaacagcactggagggatgcacagcaatcatcgtggtgatgagtgtactgtgggcttcggagatcacgccactgctgccgcccgctgcccgccaccatcttc

SEQ ID NO: 192 - DNA, 182 bp, Artificial Sequence
  Description of Artificial Sequence: Synthetic polynucleotide
ccaataattcaagccaagcaagtatataggtgttttaatagtttttgtttgcagtcctctgatctgcacagcagttcgtggtacaagaagaatgtagtaccacgatgactgctgtgcagattggtggcctgctatttccttcaaatgaatgatttttactaattttgtgtacttttattgtg

SEQ ID NO: 193 - DNA, 180 bp, Artificial Sequence
  Description of Artificial Sequence: Synthetic polynucleotide
cggaccacggtgtccccttctctccagctgggggtctcgggtcctggcgctgagaggccgcaccacgatgactgctgtgcagagtgcacccgtgtctgccaatagctgtaatcgtgggcggccctagcgacctgcggcggcgccgggaaagccctgcctctgcagcgggtcccaggggtc

SEQ ID NO: 194 - DNA, 186 bp, Artificial Sequence
  Description of Artificial Sequence: Synthetic polynucleotide
gatgctacaagtggcccacttctgagatgcgggctgcttctggatgacactgcttcccgaggcagtcgttgactgtggacttatatatggattactttgctatatcgttcacggtcagcgactgtttcggcaagtgcctcctcgctggccccagggtaccacccggagcacaggtttggtgacctt

SEQ ID NO: 195 - DNA, 210 bp, Artificial Sequence
  Description of Artificial Sequence: Synthetic polynucleotide
aggagggtgggggtggaggcaagcagaggacttcctgatcgcgtacccatggctacagtctttcttcatgtgactcgtggactatcgttcacggtcagcgactggagaatatatgaaggcagtgctgaacgtgaacgatcgttcaattgtcatcactggcatcttttttgatcattgcaccatcatcaaatgcattgggataaccatgac

SEQ ID NO: 196 - DNA, 185 bp, Artificial Sequence
  Description of Artificial Sequence: Synthetic polynucleotide
cattttccctccctttcccttaggagcctgttcctctcacgccctcacctggctgagccgcatagtcgctgacttgaacagatatatgtcctgacccagctatatcgttcacggtcagcgactgtgccctctgcccctggcttcgaggaggaggaggagctgctttccccatcatctggaaggtg

SEQ ID NO: 197 - DNA, 187 bp, Artificial Sequence
  Description of Artificial Sequence: Synthetic polynucleotide
ggagtcaggaggcctgggcagcctgaagagtacacgccgacggacagacagacagtgcagtcacctatcgttcacggtcagcgactaacagcactggagggtgtcgctgacagtgaacgatagatgagtgtactgtgggcttcggagatcacgccactgctgccgcccgctgcccgccaccatcttc

SEQ ID NO: 198 - DNA, 189 bp, Artificial Sequence
  Description of Artificial Sequence: Synthetic polynucleotide
cttctgaagaaaatatatttctttttattcatagctcttatgatagcaatgtcagcagtgccttatcgttcacggtcagcgactgttaagattctaaaattatctgtcgctgagcgctgaacgatgaagtaaggttgaccatactctacagttgtgttttaatgtatattaatgttactaatgtgtttt

SEQ ID NO: 199 - DNA, 186 bp, Artificial Sequence
  Description of Artificial Sequence: Synthetic polynucleotide
gatgctacaagtggcccacttctgagatgcgggctgcttctggatgacactgcttcccgaggactacttcaatgtcctgaccttatatggattactttgctataactcaggacattgaagtagttttcggcaagtgcctcctcgctggccccagggtaccacccggagcacaggtttggtgacctt

SEQ ID NO: 200 - DNA, 210 bp, Artificial Sequence
  Description of Artificial Sequence: Synthetic polynucleotide
aggagggtgggggtggaggcaagcagaggacttcctgatcgcgtacccatggctacagtctttcttcatgtgactcgtggactaactcaggacattgaagtagtgagaatatatgaaggactattcagagtcctgagttcgttcaattgtcatcactggcatcttttttgatcattgcaccatcatcaaatgcattgggataaccatgac

SEQ ID NO: 201 - DNA, 172 bp, Artificial Sequence
  Description of Artificial Sequence: Synthetic polynucleotide
tgtctgcttgttttgcctaccatcgtgacatctccatggctgtaccaccttgtcgggtaactcaggacattgaagtagtctgttgaatctcatggctactccaatgcctgagttgtctgacattttggtatctttcatctgaccatccatatccaatgttctcatttaaaca

SEQ ID NO: 202 - DNA, 181 bp, Artificial Sequence
  Description of Artificial Sequence: Synthetic polynucleotide
cagttctgttttgattttttttgtttgttttttgatcagtgctaatcttcgatactcgaaggaactactgtaatgtctgacgtttctttatttatgataactcaggacattgaagtagtttttttagtatcaaatcccaccctggaggcacttcctgttcctgatgcagccttcagggagg

SEQ ID NO: 203 - DNA, 182 bp, Artificial Sequence
  Description of Artificial Sequence: Synthetic polynucleotide
ccaataattcaagccaagcaagtatataggtgttttaatagtttttgtttgcagtcctctggactacttcaatgttgagtttacaagaagaatgtagttaactcaggacattgaagtagtctggtggcctgctatttccttcaaatgaatgatttttactaattttgtgtacttttattgtg

SEQ ID NO: 204 - DNA, 180 bp, Artificial Sequence
  Description of Artificial Sequence: Synthetic polynucleotide
cggaccacggtgtccccttctctccagctgggggtctcgggtcctggcgctgagaggccgcagatccacgttactcaccctaggtgcacccgtgctaggcagtgagcaaagtggatcgcggccctagcgacctgcggcggcgccgggaaagccctgcctctgcagcgggtcccaggggtc

SEQ ID NO: 205 - DNA, 210 bp, Artificial Sequence
  Description of Artificial Sequence: Synthetic polynucleotide
aggagggtgggggtggaggcaagcagaggacttcctgatcgcgtacccatggctacagtctttcttcatgtgactcgtggacagatccacgttactcaccctaggagaatatatgaaggctaggtgagaaacgtggatcggttcaattgtcatcactggcatcttttttgatcattgcaccatcatcaaatgcattgggataaccatgac

SEQ ID NO: 206 - DNA, 186 bp, Artificial Sequence
  Description of Artificial Sequence: Synthetic polynucleotide
gatgctacaagtggcccacttctgagatgcgggctgcttctggatgacactgcttcccgaggctagggtgagtaacgtggcctcttatggattactttgctaagatccacgttactcaccctagtttcggcaagtgcctcctcgctggccccagggtaccacccggagcacaggtttggtgacctt

SEQ ID NO: 207 - DNA, 172 bp, Artificial Sequence
  Description of Artificial Sequence: Synthetic polynucleotide
tgtctgcttgttttgcctaccatcgtgacatctccatggctgtaccaccttgtcgggagatccacgttactcaccctagctgttgaatctcatggtagggcgagtacgtggatcgtctgacattttggtatctttcatctgaccatccatatccaatgttctcatttaaaca

SEQ ID NO: 208 - DNA, 185 bp, Artificial Sequence
  Description of Artificial Sequence: Synthetic polynucleotide
cattttccctccctttcccttaggagcctgttcctctcacgccctcacctggctgagccgcactagggtgagtacgtggcatcttatgtcctgacccagctaagatccacgttactcaccctagtgccctctgcccctggcttcgaggaggaggaggagctgctttccccatcatctggaaggtg

SEQ ID NO: 209 - DNA, 210 bp, Artificial Sequence
  Description of Artificial Sequence: Synthetic polynucleotide
aggagggtgggggtggaggcaagcagaggacttcctgatcgcgtacccatggctacagtctttcttcatgtgactcgtggaccattatgcctgggatttggatcgagaatatatgaagggatcagatcgcaggcataattgttcaattgtcatcactggcatcttttttgatcattgcaccatcatcaaatgcattgggataaccatgac

SEQ ID NO: 210 - DNA, 207 bp, Artificial Sequence
  Description of Artificial Sequence: Synthetic polynucleotide
agggactgggcccacggggaggcagcgtccccgaggcagcagcggcagcggcggctcctctccccatggccctgcattatgcctgggatttggatcctgggctcagacctccaaatccacacatagtgcagggacctggggaccccggcaccggcaggccccaaggggtgaggtgagcgggcattgggacctcccctccctgtactc

SEQ ID NO: 211 - DNA, 171 bp, Artificial Sequence
  Description of Artificial Sequence: Synthetic polynucleotide
caggttaacccaacagaaggctaaagaaggtatattgctgttgacagtgagcgaccattatgcctgggatttggatcctgtgaagccacagatggggatccagatcaggcatagtggctgcctactgcctcggacttcaaggggctactttaggagcaattatcttgttta

SEQ ID NO: 212 - DNA, 186 bp, Artificial Sequence
  Description of Artificial Sequence: Synthetic polynucleotide
gatgctacaagtggcccacttctgagatgcgggctgcttctggatgacactgcttcccgagggatccggatcctaggtatccatgtatggattactttgctacattatgcctgggatttggatctttcggcaagtgcctcctcgctggccccagggtaccacccggagcacaggtttggtgacctt

SEQ ID NO: 213 - DNA, 189 bp, Artificial Sequence
  Description of Artificial Sequence: Synthetic polynucleotide
cttctgaagaaaatatatttctttttattcatagctcttatgatagcaatgtcagcagtgcctcattatgcctgggatttggatcttaagattctaaaattatcttccgaatcacatggcataatgaagtaaggttgaccatactctacagttgtgttttaatgtatattaatgttactaatgtgtttt

SEQ ID NO: 214 - DNA, 185 bp, Artificial Sequence
  Description of Artificial Sequence: Synthetic polynucleotide
ttagcaggaaaaaagagaacatcaccttgtaaaactgaagattgtgaccagtcagaataatgtcattatgcctgggatttggatcgtgatatgtgcatcggccagaaccaaggcataagtagcattatggtgacagctgcctcgggaagccaagttgggctttaaagtgcagggcctgctgatgt

SEQ ID NO: 215 - DNA, 185 bp, Artificial Sequence
  Description of Artificial Sequence: Synthetic polynucleotide
ccggggtcctgtctgcatccagcgcagcattctggaagacgccacgcctccgctggcgacggactccaaatcccgtgcataatcgctgtgacacttcaaaccattatgcctgggatttggatcccgtccacggcaccgcatcgaaaacgccgctgagacctcagccttgacctccctcagcgtgg

SEQ ID NO: 216 - DNA, 212 bp, Artificial Sequence
  Description of Artificial Sequence: Synthetic polynucleotide
caatggtggaatgtggaggtgaagttaacaccttcgtggctacagagtttccttagcagagctgcattatgcctgggatttggatctgtctaaactatgattcgaatccaaggcatatggtagctactgctaggcaatccttccctcgataaatgtcttggcatcgtttgctttgagcaagaaggttcatctgatatcagtcttctcaatct

SEQ ID NO: 217 - DNA, 210 bp, Artificial Sequence
  Description of Artificial Sequence: Synthetic polynucleotide
acaggctgattgtatctgtctatgagcaaaggaaacctgaaggaaccaagggcctggctggacagagttgtcatgtgatgatgaaaggacagtgaattagcagaacatccgctcacctgttaattcacatccctttcatcagcacatgacaacccagcctgaatgacaaccagccattgaaagaaagcagccctcacaccatagcatcta

SEQ ID NO: 218 - DNA, 181 bp, Artificial Sequence
  Description of Artificial Sequence: Synthetic polynucleotide
gggtttattgtaagagagcattatgaagaaaaaaatagatcataaagcttcttcaggacgatggaagggttgtgaacgttagatttaaatagtgattgtctaattcacatccctttcatcagtcttgggggagaccagctgcgctgcactaccaacagcaaaagaagtgaatgggacagct

SEQ ID NO: 219 - DNA, 210 bp, Artificial Sequence
  Description of Artificial Sequence: Synthetic polynucleotide
aggagggtgggggtggaggcaagcagaggacttcctgatcgcgtacccatggctacagtctttcttcatgtgactcgtggactaattcacatccctttcatcaggagaatatatgaaggctgaggaagaggtgtgaattcgttcaattgtcatcactggcatcttttttgatcattgcaccatcatcaaatgcattgggataaccatgac

SEQ ID NO: 220 - DNA, 188 bp, Artificial Sequence
  Description of Artificial Sequence: Synthetic polynucleotide
tttaccaatgaaaagcatttaactgttttggattccaaactagcagcactacaatgctttgctagtgatgaataggctgcgaattatcgcctcttcaatggataattcacatccctttcatcagtagctatgcattgattactacgggacaaccaacgttttcatttgtgaatatcaattacttgcca

SEQ ID NO: 221 - DNA, 171 bp, Artificial Sequence
  Description of Artificial Sequence: Synthetic polynucleotide
caggttaacccaacagaaggctaaagaaggtatattgctgttgacagtgagcgactagtcgttgggtaaagtcgccactgtgaagccacagatgggtggtgacttctcaacgattagctgcctactgcctcggacttcaaggggctactttaggagcaattatcttgttta

SEQ ID NO: 222 - DNA, 186 bp, Artificial Sequence
  Description of Artificial Sequence: Synthetic polynucleotide
gatgctacaagtggcccacttctgagatgcgggctgcttctggatgacactgcttcccgaggtggcgattttacccaatgctctatatggattactttgctatagtcgttgggtaaagtcgccatttcggcaagtgcctcctcgctggccccagggtaccacccggagcacaggtttggtgacctt

SEQ ID NO: 223 - DNA, 210 bp, Artificial Sequence
  Description of Artificial Sequence: Synthetic polynucleotide
aggagggtgggggtggaggcaagcagaggacttcctgatcgcgtacccatggctacagtctttcttcatgtgactcgtggactagtcgttgggtaaagtcgccagagaatatatgaaggtggcactttcctcaacgactcgttcaattgtcatcactggcatcttttttgatcattgcaccatcatcaaatgcattgggataaccatgac

SEQ ID NO: 224 - DNA, 207 bp, Artificial Sequence
  Description of Artificial Sequence: Synthetic polynucleotide
agggactgggcccacggggaggcagcgtccccgaggcagcagcggcagcggcggctcctctccccatggccctgtagtcgttgggtaaagtcgccactgggctcagaccgcgacttaccacacgactacagggacctggggaccccggcaccggcaggccccaaggggtgaggtgagcgggcattgggacctcccctccctgtactc

SEQ ID NO: 225 - DNA, 185 bp, Artificial Sequence
  Description of Artificial Sequence: Synthetic polynucleotide
ttagcaggaaaaaagagaacatcaccttgtaaaactgaagattgtgaccagtcagaataatgtgttgctttccgctaagtggtgagtgatatgtgcatctcccactcagaggaaagcactagcattatggtgacagctgcctcgggaagccaagttgggctttaaagtgcagggcctgctgatgt

SEQ ID NO: 226 - DNA, 212 bp, Artificial Sequence
  Description of Artificial Sequence: Synthetic polynucleotide
caatggtggaatgtggaggtgaagttaacaccttcgtggctacagagtttccttagcagagctggttgctttccgctaagtggtgatgtctaaactattcaccacttagaggaaagcctctagctactgctaggcaatccttccctcgataaatgtcttggcatcgtttgctttgagcaagaaggttcatctgatatcagtcttctcaatct

SEQ ID NO: 227 - DNA, 185 bp, Artificial Sequence
  Description of Artificial Sequence: Synthetic polynucleotide
ccggggtcctgtctgcatccagcgcagcattctggaagacgccacgcctccgctggcgacgggaaccacttagcgcgaagcaaggctgtgacacttcaaacgttgctttccgctaagtggtgaccgtccacggcaccgcatcgaaaacgccgctgagacctcagccttgacctccctcagcgtgg

SEQ ID NO: 228 - DNA, 171 bp, Artificial Sequence
  Description of Artificial Sequence: Synthetic polynucleotide
caggttaacccaacagaaggctaaagaaggtatattgctgttgacagtgagcgactttgcagtggccttcgtggcccctgtgaagccacagatggggggtcacgagccactgcgaagctgcctactgcctcggacttcaaggggctactttaggagcaattatcttgttta

SEQ ID NO: 229 - DNA, 186 bp, Artificial Sequence
  Description of Artificial Sequence: Synthetic polynucleotide
gatgctacaagtggcccacttctgagatgcgggctgcttctggatgacactgcttcccgagggggctatgaaggccattgagaaatatggattactttgctatttgcagtggccttcgtagccctttcggcaagtgcctcctcgctggccccagggtaccacccggagcacaggtttggtgacctt

SEQ ID NO: 230 - DNA, 185 bp, Artificial Sequence
  Description of Artificial Sequence: Synthetic polynucleotide
ttagcaggaaaaaagagaacatcaccttgtaaaactgaagattgtgaccagtcagaataatgttttgcagtggccttcgtggcccgtgatatgtgcatcggtcacgtagactactgcactcgcattatggtgacagctgcctcgggaagccaagttgggctttaaagtgcagggcctgctgatgt

SEQ ID NO: 231 - DNA, 212 bp, Artificial Sequence
  Description of Artificial Sequence: Synthetic polynucleotide
caatggtggaatgtggaggtgaagttaacaccttcgtggctacagagtttccttagcagagctgtttgcagtggccttcgtggccctgtctaaactatgggtcacgaagaccactgcccatagctactgctaggcaatccttccctcgataaatgtcttggcatcgtttgctttgagcaagaaggttcatctgatatcagtcttctcaatct

SEQ ID NO: 232 - DNA, 207 bp, Artificial Sequence
  Description of Artificial Sequence: Synthetic polynucleotide
agggactgggcccacggggaggcagcgtccccgaggcagcagcggcagcggcggctcctctccccatggccctgagcctcccgtcctaagaccccactgggctcagacagggtcttggaaaggaggctcagggacctggggaccccggcaccggcaggccccaaggggtgaggtgagcgggcattgggacctcccctccctgtactc

SEQ ID NO: 233 - DNA, 181 bp, Artificial Sequence
  Description of Artificial Sequence: Synthetic polynucleotide
gggtttattgtaagagagcattatgaagaaaaaaatagatcataaagcttcttcagggtgggtcttaggtcgggagctgctgatttaaatagtgattgtcagcctcccgtcctaagaccccaccttgggggagaccagctgcgctgcactaccaacagcaaaagaagtgaatgggacagct

SEQ ID NO: 234 - DNA, 209 bp, Artificial Sequence
  Description of Artificial Sequence: Synthetic polynucleotide
tctcccatccccttcagatacttacagatactgtaaagtgagtagaattctgagttttgaggttgcttcagtgagcctcccgtcctaagaccccacttggaattaaaatcaagtgggtcttgacgggtggcaccctatggctaaccatcatctactccatggtgctcagaattcgctgaagacaggaaaccaaaggtggacacaccagg

SEQ ID NO: 235 - DNA, 186 bp, Artificial Sequence
  Description of Artificial Sequence: Synthetic polynucleotide
gatgctacaagtggcccacttctgagatgcgggctgcttctggatgacactgcttcccgaggccagggtgagtaacgtggcctcttatggattactttgctaagatccacgttactcaccctggtttcggcaagtgcctcctcgctggccccagggtaccacccggagcacaggtttggtgacctt

SEQ ID NO: 236 - DNA, 171 bp, Artificial Sequence
  Description of Artificial Sequence: Synthetic polynucleotide
caggttaacccaacagaaggctaaagaaggtatattgctgttgacagtgagcgacagatccacgttactcacccaagctgtgaagccacagatgggcttgggtgagacgtggatctgctgcctactgcctcggacttcaaggggctactttaggagcaattatcttgttta

SEQ ID NO: 237 - DNA, 188 bp, Artificial Sequence
  Description of Artificial Sequence: Synthetic polynucleotide
tttaccaatgaaaagcatttaactgttttggattccaaactagcagcactacaatgctttgctagaggggtgtataccgcggatcttcgcctcttcaatggaagatccacgttactcacccctgtagctatgcattgattactacgggacaaccaacgttttcatttgtgaatatcaattacttgcca

SEQ ID NO: 238 - DNA, 212 bp, Artificial Sequence
  Description of Artificial Sequence: Synthetic polynucleotide
caatggtggaatgtggaggtgaagttaacaccttcgtggctacagagtttccttagcagagctgagatccacgttactcacccttgtgtctaaactatcaagggtgagtcacgtggagattagctactgctaggcaatccttccctcgataaatgtcttggcatcgtttgctttgagcaagaaggttcatctgatatcagtcttctcaatct

SEQ ID NO: 239 - DNA, 181 bp, Artificial Sequence
  Description of Artificial Sequence: Synthetic polynucleotide
gggtttattgtaagagagcattatgaagaaaaaaatagatcataaagcttcttcaggaaagatccacgttactcacccttagatttaaatagtgattgtctaggtgagttacgtggatctgttcttgggggagaccagctgcgctgcactaccaacagcaaaagaagtgaatgggacagct

SEQ ID NO: 240 - DNA, 210 bp, Artificial Sequence
  Description of Artificial Sequence: Synthetic polynucleotide
acaggctgattgtatctgtctatgagcaaaggaaacctgaaggaaccaagggcctggctggacagagttgtcatgtgtcagatccacgttactcaccctgcagaacatccgctcacctgtagggtgagactcgtggatctgtcacatgacaacccagcctgaatgacaaccagccattgaaagaaagcagccctcacaccatagcatcta

SEQ ID NO: 241 - DNA, 171 bp, Artificial Sequence
  Description of Artificial Sequence: Synthetic polynucleotide
caggttaacccaacagaaggctaaagaaggtatattgctgttgacagtgagcgacttcaggaatgggttccaaggagctgtgaagccacagatgggctccttggaccattcctgaagctgcctactgcctcggacttcaaggggctactttaggagcaattatcttgttta

SEQ ID NO: 242 - DNA, 191 bp, Artificial Sequence
  Description of Artificial Sequence: Synthetic polynucleotide
gtcttggaggctggggcacctcggggaaggacgccggcatcagcaccattctggggtacggggatggattcaggaatgggttccaaggaattgtttctaatgtcctgaagccattcatggagccgtccgtatccgctgcagcctgtggggcctgcgggccggggagccgatcgcgcttcagctcagcgcct

SEQ ID NO: 243 - DNA, 185 bp, Artificial Sequence
  Description of Artificial Sequence: Synthetic polynucleotide
ttagcaggaaaaaagagaacatcaccttgtaaaactgaagattgtgaccagtcagaataatgtttcaggaatgggttccaaggaagtgatatgtgcatcttcttggtacacgttcctgctcacattatggtgacagctgcctcgggaagccaagttgggctttaaagtgcagggcctgctgatgt

SEQ ID NO: 244 - DNA, 212 bp, Artificial Sequence
  Description of Artificial Sequence: Synthetic polynucleotide
caatggtggaatgtggaggtgaagttaacaccttcgtggctacagagtttccttagcagagctgttcaggaatgggttccaaggagtgtctaaactatctccttggaacacattcctacatagctactgctaggcaatccttccctcgataaatgtcttggcatcgtttgctttgagcaagaaggttcatctgatatcagtcttctcaatct

SEQ ID NO: 245 - DNA, 207 bp, Artificial Sequence
  Description of Artificial Sequence: Synthetic polynucleotide
agggactgggcccacggggaggcagcgtccccgaggcagcagcggcagcggcggctcctctccccatggccctgtataatataatagaaccacaggctgggctcagacgtgtggtttatcctgttgtacagggacctggggaccccggcaccggcaggccccaaggggtgaggtgagcgggcattgggacctcccctccctgtactc

SEQ ID NO: 246 - DNA, 168 bp, Artificial Sequence
  Description of Artificial Sequence: Synthetic polynucleotide
tgtggtgctgggggcttcagcggccggctctgatctccatcctccctggggcatataatataatagaaccacagggcccttcatgctgcccagcttgtggttctattatgttataactcggggtgggagtcagcaggaggtgagggggcatggtggccccagtgcagc

SEQ ID NO: 247 - DNA, 186 bp, Artificial Sequence
  Description of Artificial Sequence: Synthetic polynucleotide
gatgctacaagtggcccacttctgagatgcgggctgcttctggatgacactgcttcccgaggcgtgctgaactggtatcgaaatgtatggattactttgctacatgcggtaccagtttagcacgtttcggcaagtgcctcctcgctggccccagggtaccacccggagcacaggtttggtgacctt

SEQ ID NO: 248 - DNA, 212 bp, Artificial Sequence
  Description of Artificial Sequence: Synthetic polynucleotide
caatggtggaatgtggaggtgaagttaacaccttcgtggctacagagtttccttagcagagctgcatgcggtaccagtttagcacgtgtctaaactatcgtgctagacttgtactgtcagtagctactgctaggcaatccttccctcgataaatgtcttggcatcgtttgctttgagcaagaaggttcatctgatatcagtcttctcaatct

SEQ ID NO: 249 - DNA, 171 bp, Artificial Sequence
  Description of Artificial Sequence: Synthetic polynucleotide
caggttaacccaacagaaggctaaagaaggtatattgctgttgacagtgagcgaccatgcggtaccagtttagcacgctgtgaagccacagatgggcgtgctagaggtgtcgcatggctgcctactgcctcggacttcaaggggctactttaggagcaattatcttgttta

SEQ ID NO: 250 - DNA, 186 bp, Artificial Sequence
  Description of Artificial Sequence: Synthetic polynucleotide
gatgctacaagtggcccacttctgagatgcgggctgcttctggatgacactgcttcccgaggcagcgagggagaagattaccatttatggattactttgctaaatatagtcttctccctcgctgtttcggcaagtgcctcctcgctggccccagggtaccacccggagcacaggtttggtgacctt

SEQ ID NO: 251 - DNA, 176 bp, Artificial Sequence
  Description of Artificial Sequence: Synthetic polynucleotide
tgaagccacaggagccaagagcaggaggaccaaggccctggcgaaggccgtggcctcgaatatagtcttctccctcgcttgtgcaggtcccaatggagcgagggataggactatactcggggacgcgggcctggacgccggcatccgggctcaggacccccctctctgccagaggc

SEQ ID NO: 252 - DNA, 171 bp, Artificial Sequence
  Description of Artificial Sequence: Synthetic polynucleotide
caggttaacccaacagaaggctaaagaaggtatattgctgttgacagtgagcgacaatatagtcttctccctcgctgctgtgaagccacagatgggcagtgagggaagactatgttgctgcctactgcctcggacttcaaggggctactttaggagcaattatcttgttta

SEQ ID NO: 253 - DNA, 186 bp, Artificial Sequence
  Description of Artificial Sequence: Synthetic polynucleotide
gatgctacaagtggcccacttctgagatgcgggctgcttctggatgacactgcttcccgaggccggttgaacattggttgcctcatatggattactttgctatgaacgaccagtgtttaaccggtttcggcaagtgcctcctcgctggccccagggtaccacccggagcacaggtttggtgacctt

SEQ ID NO: 254 - DNA, 185 bp, Artificial Sequence
  Description of Artificial Sequence: Synthetic polynucleotide
ccggggtcctgtctgcatccagcgcagcattctggaagacgccacgcctccgctggcgacgggacggatgaacttagaggagacgctgtgacacttcaaacttctccttggagttcatccgcgccgtccacggcaccgcatcgaaaacgccgctgagacctcagccttgacctccctcagcgtgg

SEQ ID NO: 255 - DNA, 171 bp, Artificial Sequence
  Description of Artificial Sequence: Synthetic polynucleotide
caggttaacccaacagaaggctaaagaaggtatattgctgttgacagtgagcgacttctccttggagttcatccgcgctgtgaagccacagatgggcgcggatgatccaaggaggagctgcctactgcctcggacttcaaggggctactttaggagcaattatcttgttta

SEQ ID NO: 256 - DNA, 207 bp, Artificial Sequence
  Description of Artificial Sequence: Synthetic polynucleotide
agggactgggcccacggggaggcagcgtccccgaggcagcagcggcagcggcggctcctctccccatggccctgatacacatcagaatccttactgctgggctcagaccgtaaggatctcctgtgtatcagggacctggggaccccggcaccggcaggccccaaggggtgaggcgagcgggcattgggacctcccctccctgtactc

SEQ ID NO: 257 - DNA, 210 bp, Artificial Sequence
  Description of Artificial Sequence: Synthetic polynucleotide
aggagggtgggggtggaggcaagcagaggacttcctgatcgcgtacccatggctacagtctttcttcatgtgactcgtggacatacacatcagaatccttacttgagaatatatgaaggaggtaggatactgatgtgtacgttcaattgtcatcactggcatcttttttgatcattgcaccatcatcaaatgcattgggataaccatgac

SEQ ID NO: 258 - DNA, 186 bp, Artificial Sequence
  Description of Artificial Sequence: Synthetic polynucleotide
gatgctacaagtggcccacttctgagatgcgggctgcttctggatgacactgcttcccgaggcggtaaggattctgatgtaatattatggattactttgctaatacacatcagaatccttactgtttcggcaagtgcctcctcgctggccccagggtaccacccggagcacaggtttggtgacctt

SEQ ID NO: 259 - DNA, 176 bp, Artificial Sequence
  Description of Artificial Sequence: Synthetic polynucleotide
tgaagccacaggagccaagagcaggaggaccaaggccctggcgaaggccgtggcctcgatacacatcagaatccttacttgtgcaggtcccaatggagtaaggatcctgatgtgtctcggggacgcgggcctggacgccggcatccgggctcaggacccccctctctgccagaggc

SEQ ID NO: 260 - DNA, 207 bp, Artificial Sequence
  Description of Artificial Sequence: Synthetic polynucleotide
agggactgggcccacggggaggcagcgtccccgaggcagcagcggcagcggcggctcctctccccatggccctgttgttgaaggcgtttgcacatgctgggctcagacctgtgcaatgcgatcaatagcagggacctggggaccccggcaccggcaggccccaaggggtgaggcgagcgggcattgggacctcccctccctgtactc

SEQ ID NO: 261 - DNA, 189 bp, Artificial Sequence
  Description of Artificial Sequence: Synthetic polynucleotide
cttctgaagaaaatatatttctttttattcatagctcttatgatagcaatgtcagcagtgcctttgttgaaggcgtttgcacatgttaagattctaaaattatcttgtgcggaagcacttcaataaaagtaaggttgaccatactctacagttgtgttttaatgtatattaatgttactaatgtgtttt

SEQ ID NO: 262 - DNA, 186 bp, Artificial Sequence
  Description of Artificial Sequence: Synthetic polynucleotide
gatgctacaagtggcccacttctgagatgcgggctgcttctggatgacactgcttcccgaggcgtgtgtgaacgccttcacataatatggattactttgctattgttgaaggcgtttgcacatgtttcggcaagtgcctcctcgctggccccagggtaccacccggagcacaggtttggtgacctt

SEQ ID NO: 263 - DNA, 176 bp, Artificial Sequence
  Description of Artificial Sequence: Synthetic polynucleotide
tgaagccacaggagccaagagcaggaggaccaaggccctggcgaaggccgtggcctcgttgttgaaggcgtttgcacattgtgcaggtcccaatgggtgtgcaaaggtcttcaatcacggggacgcgggcctggacgccggcatccgggctcaggacccccctctctgccagaggc

SEQ ID NO: 264-266 - skipped (3 entries)

SEQ ID NO: 267 - DNA, 396 bp, Artificial Sequence
  Description of Artificial Sequence: Synthetic polynucleotide
aggagggtgggggtggaggcaagcagaggacttcctgatcgcgtacccatggctacagtctttcttcatgtgactcgtggacttcaggaatgggttccaaggatgagaatatatgaaggatcctggaagctattcctgacgttcaattgtcatcactggcatcttttttgatcattgcaccatcatcaaatgcattgggataaccatgacgatgctacaagtggcccacttctgagatgcgggctgcttctggatgacactgcttcccgaggcctgtggttctgttatatccatatatggattactttgctatataatataatagaaccacaggtttcggcaagtgcctcctcgctggccccagggtaccacccggagcacaggtttggtgacctt

SEQ ID NO: 268 - DNA, 417 bp, Artificial Sequence
  Description of Artificial Sequence: Synthetic polynucleotide
aggagggtgggggtggaggcaagcagaggacttcctgatcgcgtacccatggctacagtctttcttcatgtgactcgtggacttcaggaatgggttccaaggatgagaatatatgaaggatcctggaagctattcctgacgttcaattgtcatcactggcatcttttttgatcattgcaccatcatcaaatgcattgggataaccatgacagggactgggcccacggggaggcagcgtccccgaggcagcagcggcagcggcggctcctctccccatggccctgagatccacgttactcacccgtgctgggctcagacccgggtgataatatggatctcagggacctggggaccccggcaccggcaggccccaaggggtgaggtgagcgggcattgggacctcccctccctgtactc

SEQ ID NO: 269 - DNA, 393 bp, Artificial Sequence
  Description of Artificial Sequence: Synthetic polynucleotide
gatgctacaagtggcccacttctgagatgcgggctgcttctggatgacactgcttcccgaggcctgtggttctgttatatccatatatggattactttgctatataatataatagaaccacaggtttcggcaagtgcctcctcgctggccccagggtaccacccggagcacaggtttggtgaccttagggactgggcccacggggaggcagcgtccccgaggcagcagcggcagcggcggctcctctccccatggccctgagatccacgttactcacccgtgctgggctcagacccgggtgataatatggatctcagggacctggggaccccggcaccggcaggccccaaggggtgaggtgagcgggcattgggacctcccctccctgtactc

SEQ ID NO: 270 - DNA, 394 bp, Artificial Sequence
  Description of Artificial Sequence: Synthetic polynucleotide
ttagcaggaaaaaagagaacatcaccttgtaaaactgaagattgtgaccagtcagaataatgtagatccacgttactcaccctagtgatatgtgcatctagggtgtgtcatgtggatgaagcattatggtgacagctgcctcgggaagccaagttgggctttaaagtgcagggcctgctgatgtaggagggtgggggtggaggcaagcagaggacttcctgatcgcgtacccatggctacagtctttcttcatgtgactcgtggacttcaggaatgggttccaaggatgagaatatatgaaggatcctggaagctattcctgacgttcaattgtcatcactggcatcttttttgatcattgcaccatcatcaaatgcattgggataaccatgac

SEQ ID NO: 271 - DNA, 370 bp, Artificial Sequence
  Description of Artificial Sequence: Synthetic polynucleotide
ttagcaggaaaaaagagaacatcaccttgtaaaactgaagattgtgaccagtcagaataatgtagatccacgttactcaccctagtgatatgtgcatctagggtgtgtcatgtggatgaagcattatggtgacagctgcctcgggaagccaagttgggctttaaagtgcagggcctgctgatgtgatgctacaagtggcccacttctgagatgcgggctgcttctggatgacactgcttcccgaggcctgtggttctgttatatccatatatggattactttgctatataatataatagaaccacaggtttcggcaagtgcctcctcgctggccccagggtaccacccggagcacaggtttggtgacctt

SEQ ID NO: 272 - DNA, 396 bp, Artificial Sequence
  Description of Artificial Sequence: Synthetic polynucleotide
aggagggtgggggtggaggcaagcagaggacttcctgatcgcgtacccatggctacagtctttcttcatgtgactcgtggacagatccacgttactcaccccctgagaatatatgaaggaggggtgagaagcgtggatccgttcaattgtcatcactggcatcttttttgatcattgcaccatcatcaaatgcattgggataaccatgacgatgctacaagtggcccacttctgagatgcgggctgcttctggatgacactgcttcccgaggcctgtggttctgttatatccatatatggattactttgctatataatataatagaaccacaggtttcggcaagtgcctcctcgctggccccagggtaccacccggagcacaggtttggtgacctt

SEQ ID NO: 273 - DNA, 417 bp, Artificial Sequence
  Description of Artificial Sequence: Synthetic polynucleotide
agggactgggcccacggggaggcagcgtccccgaggcagcagcggcagcggcggctcctctccccatggccctgagatccacgttactcacccgtgctgggctcagacccgggtgataatatggatctcagggacctggggaccccggcaccggcaggccccaaggggtgaggtgagcgggcattgggacctcccctccctgtactcaggagggtgggggtggaggcaagcagaggacttcctgatcgcgtacccatggctacagtctttcttcatgtgactcgtggacttcaggaatgggttccaaggatgagaatatatgaaggatcctggaagctattcctgacgttcaattgtcatcactggcatcttttttgatcattgcaccatcatcaaatgcattgggataaccatgac

SEQ ID NO: 274 - DNA, 393 bp, Artificial Sequence
  Description of Artificial Sequence: Synthetic polynucleotide
agggactgggcccacggggaggcagcgtccccgaggcagcagcggcagcggcggctcctctccccatggccctgagatccacgttactcacccgtgctgggctcagacccgggtgataatatggatctcagggacctggggaccccggcaccggcaggccccaaggggtgaggtgagcgggcattgggacctcccctccctgtactcgatgctacaagtggcccacttctgagatgcgggctgcttctggatgacactgcttcccgaggcctgtggttctgttatatccatatatggattactttgctatataatataatagaaccacaggtttcggcaagtgcctcctcgctggccccagggtaccacccggagcacaggtttggtgacctt

SEQ ID NO: 275 - DNA, 580 bp, Artificial Sequence
  Description of Artificial Sequence: Synthetic polynucleotide
ttagcaggaaaaaagagaacatcaccttgtaaaactgaagattgtgaccagtcagaataatgtagatccacgttactcaccctagtgatatgtgcatctagggtgtgtcatgtggatgaagcattatggtgacagctgcctcgggaagccaagttgggctttaaagtgcagggcctgctgatgtaggagggtgggggtggaggcaagcagaggacttcctgatcgcgtacccatggctacagtctttcttcatgtgactcgtggacttcaggaatgggttccaaggatgagaatatatgaaggatcctggaagctattcctgacgttcaattgtcatcactggcatcttttttgatcattgcaccatcatcaaatgcattgggataaccatgacgatgctacaagtggcccacttctgagatgcgggctgcttctggatgacactgcttcccgaggcctgtggttctgttatatccatatatggattactttgctatataatataatagaaccacaggtttcggcaagtgcctcctcgctggccccagggtaccacccggagcacaggtttggtgacctt

SEQ ID NO: 276 - DNA, 748 bp, Artificial Sequence
  Description of Artificial Sequence: Synthetic polynucleotide
ttaggatgagttgagatcccagtgatcttctcgctaagagtttcctgcctgggcaaggaggaaattagcaggaaaaaagagaacatcaccttgtaaaactgaagattgtgaccagtcagaataatgtagatccacgttactcaccctagtgatatgtgcatctagggtgtgtcatgtggatgaagcattatggtgacagctgcctcgggaagccaagttgggctttaaagtgcagggcctgctgatgtaggagggtgggggtggaggcaagcagaggacttcctgatcgcgtacccatggctacagtctttcttcatgtgactcgtggacttcaggaatgggttccaaggatgagaatatatgaaggatcctggaagctattcctgacgttcaattgtcatcactggcatcttttttgatcattgcaccatcatcaaatgcattgggataaccatgacgatgctacaagtggcccacttctgagatgcgggctgcttctggatgacactgcttcccgaggcctgtggttctgttatatccatatatggattactttgctatataatataatagaaccacaggtttcggcaagtgcctcctcgctggccccagggtaccacccggagcacaggtttggtgaccttcttcctcatcagggctttgtgccagcaaatgactccctcaccaaggaagcaagagcctctgaatcccatctgggctcttcctgaacacccctatctccccctct

SEQ ID NO: 277 - DNA, 761 bp, Artificial Sequence
  Description of Artificial Sequence: Synthetic polynucleotide
ttagggattatgctgaatttgtatggtttatagttgttagagtttgaggtgttaattctaattatctatttcaaattttagcaggaaaaaagagaacatcaccttgtaaaactgaagattgtgaccagtcagaataatgtagatccacgttactcaccctagtgatatgtgcatctagggtgtgtcatgtggatgaagcattatggtgacagctgcctcgggaagccaagttgggctttaaagtgcagggcctgctgatgtaggagggtgggggtggaggcaagcagaggacttcctgatcgcgtacccatggctacagtctttcttcatgtgactcgtggacttcaggaatgggttccaaggatgagaatatatgaaggatcctggaagctattcctgacgttcaattgtcatcactggcatcttttttgatcattgcaccatcatcaaatgcattgggataaccatgacgatgctacaagtggcccacttctgagatgcgggctgcttctggatgacactgcttcccgaggcctgtggttctgttatatccatatatggattactttgctatataatataatagaaccacaggtttcggcaagtgcctcctcgctggccccagggtaccacccggagcacaggtttggtgaccttcttcctcatcagggctttgtgccagcaaatgactccctcaccaaggaagcaagagcctctgaatcccatctgggctcttcctgaacacccctatctccccctct

SEQ ID NO: 278 - DNA, 580 bp, Artificial Sequence
  Description of Artificial Sequence: Synthetic polynucleotide
aggagggtgggggtggaggcaagcagaggacttcctgatcgcgtacccatggctacagtctttcttcatgtgactcgtggacttcaggaatgggttccaaggatgagaatatatgaaggatcctggaagctattcctgacgttcaattgtcatcactggcatcttttttgatcattgcaccatcatcaaatgcattgggataaccatgacgatgctacaagtggcccacttctgagatgcgggctgcttctggatgacactgcttcccgaggcctgtggttctgttatatccatatatggattactttgctatataatataatagaaccacaggtttcggcaagtgcctcctcgctggccccagggtaccacccggagcacaggtttggtgaccttttagcaggaaaaaagagaacatcaccttgtaaaactgaagattgtgaccagtcagaataatgtagatccacgttactcaccctagtgatatgtgcatctagggtgtgtcatgtggatgaagcattatggtgacagctgcctcgggaagccaagttgggctttaaagtgcagggcctgctgatgt

SEQ ID NO: 279 - DNA, 748 bp, Artificial Sequence
  Description of Artificial Sequence: Synthetic polynucleotide
ttaggatgagttgagatcccagtgatcttctcgctaagagtttcctgcctgggcaaggaggaaaaggagggtgggggtggaggcaagcagaggacttcctgatcgcgtacccatggctacagtctttcttcatgtgactcgtggacttcaggaatgggttccaaggatgagaatatatgaaggatcctggaagctattcctgacgttcaattgtcatcactggcatcttttttgatcattgcaccatcatcaaatgcattgggataaccatgacgatgctacaagtggcccacttctgagatgcgggctgcttctggatgacactgcttcccgaggcctgtggttctgttatatccatatatggattactttgctatataatataatagaaccacaggtttcggcaagtgcctcctcgctggccccagggtaccacccggagcacaggtttggtgaccttttagcaggaaaaaagagaacatcaccttgtaaaactgaagattgtgaccagtcagaataatgtagatccacgttactcaccctagtgatatgtgcatctagggtgtgtcatgtggatgaagcattatggtgacagctgcctcgggaagccaagttgggctttaaagtgcagggcctgctgatgtcttcctcatcagggctttgtgccagcaaatgactccctcaccaaggaagcaagagcctctgaatcccatctgggctcttcctgaacacccctatctccccctct

SEQ ID NO: 280 - DNA, 756 bp, Artificial Sequence
  Description of Artificial Sequence: Synthetic polynucleotide
tggagaggagggtgggggtggaggcaagcagaggacctcctgatcatgtacccataggacagggtgatggaaaggagggtgggggtggaggcaagcagaggacttcctgatcgcgtacccatggctacagtctttcttcatgtgactcgtggacttcaggaatgggttccaaggatgagaatatatgaaggatcctggaagctattcctgacgttcaattgtcatcactggcatcttttttgatcattgcaccatcatcaaatgcattgggataaccatgacgatgctacaagtggcccacttctgagatgcgggctgcttctggatgacactgcttcccgaggcctgtggttctgttatatccatatatggattactttgctatataatataatagaaccacaggtttcggcaagtgcctcctcgctggccccagggtaccacccggagcacaggtttggtgaccttttagcaggaaaaaagagaacatcaccttgtaaaactgaagattgtgaccagtcagaataatgtagatccacgttactcaccctagtgatatgtgcatctagggtgtgtcatgtggatgaagcattatggtgacagctgcctcgggaagccaagttgggctttaaagtgcagggcctgctgatgtcttcctcatcagggctttgtgccagcaaatgactccctcaccaaggaagcaagagcctctgaatcccatctgggctcttcctgaacacccctatctccccctct

SEQ ID NO: 281 - DNA, 386 bp, Artificial Sequence
  Description of Artificial Sequence: Synthetic polynucleotide
aggagggtgggggtggaggcaagcagaggacttcctgatcgcgtacccatggctacagtctttcttcatgtgactcgtggacttcaggaatgggttccaaggatgagaatatatgaaggatcctggaagctattcctgacgttcaattgtcatcactggcatcttttttgatcattgcaccatcatcaaatgcattgggataaccatgactgaagccacaggagccaagagcaggaggaccaaggccctggcgaaggccgtggcctcgaatatagtcttctccctcgcttgtgcaggtcccaatggagcgagggataggactatactcggggacgcgggcctggacgccggcatccgggctcaggacccccctctctgccagaggc

SEQ ID NO: 282 - DNA, 396 bp, Artificial Sequence; identical to SEQ ID NO: 267
  Description of Artificial Sequence: Synthetic polynucleotide

SEQ ID NO: 283 - DNA, 362 bp, Artificial Sequence
  Description of Artificial Sequence: Synthetic polynucleotide
gatgctacaagtggcccacttctgagatgcgggctgcttctggatgacactgcttcccgaggcctgtggttctgttatatccatatatggattactttgctatataatataatagaaccacaggtttcggcaagtgcctcctcgctggccccagggtaccacccggagcacaggtttggtgacctttgaagccacaggagccaagagcaggaggaccaaggccctggcgaaggccgtggcctcgaatatagtcttctccctcgcttgtgcaggtcccaatggagcgagggataggactatactcggggacgcgggcctggacgccggcatccgggctcaggacccccctctctgccagaggc

SEQ ID NO: 284 - DNA, 396 bp, Artificial Sequence
  Description of Artificial Sequence: Synthetic polynucleotide
gatgctacaagtggcccacttctgagatgcgggctgcttctggatgacactgcttcccgaggcctgtggttctgttatatccatatatggattactttgctatataatataatagaaccacaggtttcggcaagtgcctcctcgctggccccagggtaccacccggagcacaggtttggtgaccttaggagggtgggggtggaggcaagcagaggacttcctgatcgcgtacccatggctacagtctttcttcatgtgactcgtggacaatatagtcttctccctcgcttgagaatatatgaaggaagcagggacaggactatattgttcaattgtcatcactggcatcttttttgatcattgcaccatcatcaaatgcattgggataaccatgac

SEQ ID NO: 285 - DNA, 360 bp, Artificial Sequence
  Description of Artificial Sequence: Synthetic polynucleotide
ttagcaggaaaaaagagaacatcaccttgtaaaactgaagattgtgaccagtcagaataatgtagatccacgttactcaccctagtgatatgtgcatctagggtgtgtcatgtggatgaagcattatggtgacagctgcctcgggaagccaagttgggctttaaagtgcagggcctgctgatgttgaagccacaggagccaagagcaggaggaccaaggccctggcgaaggccgtggcctcgaatatagtcttctccctcgcttgtgcaggtcccaatggagcgagggataggactatactcggggacgcgggcctggacgccggcatccgggctcaggacccccctctctgccagaggc

SEQ ID NO: 286 - DNA, 394 bp, Artificial Sequence
  Description of Artificial Sequence: Synthetic polynucleotide
ttagcaggaaaaaagagaacatcaccttgtaaaactgaagattgtgaccagtcagaataatgtagatccacgttactcaccctagtgatatgtgcatctagggtgtgtcatgtggatgaagcattatggtgacagctgcctcgggaagccaagttgggctttaaagtgcagggcctgctgatgtaggagggtgggggtggaggcaagcagaggacttcctgatcgcgtacccatggctacagtctttcttcatgtgactcgtggacaatatagtcttctccctcgcttgagaatatatgaaggaagcagggacaggactatattgttcaattgtcatcactggcatcttttttgatcattgcaccatcatcaaatgcattgggataaccatgac

SEQ ID NO: 287 - DNA, 394 bp, Artificial Sequence; identical to SEQ ID NO: 270
  Description of Artificial Sequence: Synthetic polynucleotide

SEQ ID NO: 288 - DNA, 370 bp, Artificial Sequence; identical to SEQ ID NO: 271
  Description of Artificial Sequence: Synthetic polynucleotide

SEQ ID NO: 289 - DNA, 386 bp, Artificial Sequence
  Description of Artificial Sequence: Synthetic polynucleotide
aggagggtgggggtggaggcaagcagaggacttcctgatcgcgtacccatggctacagtctttcttcatgtgactcgtggacagatccacgttactcaccccctgagaatatatgaaggaggggtgagaagcgtggatccgttcaattgtcatcactggcatcttttttgatcattgcaccatcatcaaatgcattgggataaccatgactgaagccacaggagccaagagcaggaggaccaaggccctggcgaaggccgtggcctcgaatatagtcttctccctcgcttgtgcaggtcccaatggagcgagggataggactatactcggggacgcgggcctggacgccggcatccgggctcaggacccccctctctgccagaggc

SEQ ID NO: 290 - DNA, 396 bp, Artificial Sequence; identical to SEQ ID NO: 272
  Description of Artificial Sequence: Synthetic polynucleotide

SEQ ID NO: 291 - DNA, 16 bp, Artificial Sequence
  Description of Artificial Sequence: Synthetic oligonucleotide
aggtaagagtcgatcg

SEQ ID NO: 292 - DNA, 48 bp, Artificial Sequence
  Description of Artificial Sequence: Synthetic oligonucleotide
acgcgttactaactggtacctcttttttttttttgatatcctgcaggc

SEQ ID NO: 293 - protein, 111 aa, Artificial Sequence
  Description of Artificial Sequence: Synthetic polypeptide
DIQMTQSPSSLSASVGDRVTITCRASESVDNYGISFMNWFQQKPGKAPKLLIYAASNQGSGVPSRFSGSGSGTDFTLTISSLQPDDFATYYCQQSKEVPWTFGQGTKVEIK

SEQ ID NO: 294 - protein, 116 aa, Artificial Sequence
  Description of Artificial Sequence: Synthetic polypeptide
QVQLVQSGAEVKKPGSSVKVSCKASGYTFTDYNMHWVRQAPGQGLEWIGYIYPYNGGTGYNQKFKSKATITADESTNTAYMELSSLRSEDTAVYYCARGRPAMDYWGQGTLVTVSS

SEQ ID NO: 295 - protein, 117 aa, Artificial Sequence
  Description of Artificial Sequence: Synthetic polypeptide
QVQLQQSGPELVRPGTFVKISCKASGYTFTNYDINWVNQRPGQGLEWIGWIYPGDGSTKYNEKFKAKATLTADKSSSTAYLQLNNLTSENSAVYFCASGYEDAMDYWGQGTSVTVSS

SEQ ID NO: 296 - protein, 108 aa, Artificial Sequence
  Description of Artificial Sequence: Synthetic polypeptide
DIKMTQSPSSMYASLGERVIINCKASQDINSYLSWFQQKPGKSPKTLIYRANRLVDGVPSRFSGSGSGQDYSLTISSLEYEDMGIYYCLQYDEFPLTFGAGTKLELKR

SEQ ID NO: 297 - protein, 120 aa, Artificial Sequence
  Description of Artificial Sequence: Synthetic polypeptide
EVKLQESGPELVKPGASVKMSCKASGYKFTDYVVHWLKQKPGQGLEWIGYINPYNDGTKYNEKFKGKATLTSDKSSSTAYMEVSSLTSEDSAVYYCARDYRYEVYGMDYWGQGTSVTVSS

SEQ ID NO: 298 - protein, 115 aa, Artificial Sequence
  Description of Artificial Sequence: Synthetic polypeptide
DIVLTQSPTIMSASPGERVTMTCTASSSVNYIHWYQQKSGDSPLRWIFDTSKVASGVPARFSGSGSGTSYSLTISTMEAEDAATYYCQQWRSYPLTFGDGTRLELKRADAAPTVS

SEQ ID NO: 299 - protein, 118 aa, Artificial Sequence
  Description of Artificial Sequence: Synthetic polypeptide
QVQLQQPGAEVVKPGASVKMSCKASGYTFTSYYIHWIKQTPGQGLEWVGVIYPGNDDISYNQKFKGKATLTADKSSTTAYMQLSSLTSEDSAVYYCAREVRLRYFDVWGAGTTVTVSS

SEQ ID NO: 300 - protein, 113 aa, Artificial Sequence
  Description of Artificial Sequence: Synthetic polypeptide
NIMLTQSPSSLAVSAGEKVTMSCKSSQSVFFSSSQKNYLAWYQQIPGQSPKLLIYWASTRESGVPDRFTGSGSGTDFTLTISSVQSEDLAIYYCHQYLSSRTFGGGTKLEIKR

SEQ ID NO: 301 - DNA, 333 bp, Artificial Sequence
  Description of Artificial Sequence: Synthetic polynucleotide
gacattcagatgacccagtctccgagctctctgtccgcatcagtaggagacagggtcaccatcacatgcagagccagcgaaagtgtcgacaattatggcattagctttatgaactggttccaacagaaacccgggaaggctcctaagcttctgatttacgctgcatccaaccaaggctccggggtaccctctcgcttctcaggcagtggatctgggacagacttcactctcaccatttcatctctgcagcctgatgacttcgcaacctattactgtcagcaaagtaaggaggttccgtggacgttcggtcaagggaccaaggtggagatcaaa

SEQ ID NO: 302 - DNA, 348 bp, Artificial Sequence
  Description of Artificial Sequence: Synthetic polynucleotide
caggttcagctggtgcagtctggagctgaggtgaagaagcctgggagctcagtgaaggtttcctgcaaagcttctggctacaccttcactgactacaacatgcactgggtgaggcaggctcctggccaaggcctggaatggattggatatatttatccttacaatggtggtaccggctacaaccagaagttcaagagcaaggccacaattacagcagacgagagtactaacacagcctacatggaactctccagcctgaggtctgaggacactgcagtctattactgcgcaagagggcgccccgctatggactactggggccaagggactctggtcactgtctcttca

SEQ ID NO: 303 - protein, 242 aa, Artificial Sequence
  Description of Artificial Sequence: Synthetic polypeptide
DIQMTQSPSSLSASVGDRVTITCRASESVDNYGISFMNWFQQKPGKAPKLLIYAASNQGSGVPSRFSGSGSGTDFTLTISSLQPDDFATYYCQQSKEVPWTFGQGTKVEIKGGGGSGGGGSGGGGSQVQLVQSGAEVKKPGSSVKVSCKASGYTFTDYNMHWVRQAPGQGLEWIGYIYPYNGGTGYNQKFKSKATITADESTNTAYMELSSLRSEDTAVYYCARGRPAMDYWGQGTLVTVSS

SEQ ID NO: 304 - DNA, 726 bp, Artificial Sequence
  Description of Artificial Sequence: Synthetic polynucleotide
gacattcagatgacccagtctccgagctctctgtccgcatcagtaggagacagggtcaccatcacatgcagagccagcgaaagtgtcgacaattatggcattagctttatgaactggttccaacagaaacccgggaaggctcctaagcttctgatttacgctgcatccaaccaaggctccggggtaccctctcgcttctcaggcagtggatctgggacagacttcactctcaccatttcatctctgcagcctgatgacttcgcaacctattactgtcagcaaagtaaggaggttccgtggacgttcggtcaagggaccaaggtggagatcaaaggtggcggtggctcgggcggtggtgggtcgggtggcggcggatctcaggttcagctggtgcagtctggagctgaggtgaagaagcctgggagctcagtgaaggtttcctgcaaagcttctggctacaccttcactgactacaacatgcactgggtgaggcaggctcctggccaaggcctggaatggattggatatatttatccttacaatggtggtaccggctacaaccagaagttcaagagcaaggccacaattacagcagacgagagtactaacacagcctacatggaactctccagcctgaggtctgaggacactgcagtctattactgcgcaagagggcgccccgctatggactactggggccaagggactctggtcactgtctcttca

SEQ ID NO: 305 - protein, 119 aa, Artificial Sequence
  Description of Artificial Sequence: Synthetic polypeptide
QVQLVQSGAEVKKPGSSVKVSCKASGYAFSNFWMNWVRQAPGQGLEWMGQIYPGDGDTNYNGKFKGRVTITADKSTSTAYMELSSLRSEDTAVYYCARSYYRSAWFAYWGQGTLVTVSS

SEQ ID NO: 306 - protein, 119 aa, Artificial Sequence
  Description of Artificial Sequence: Synthetic polypeptide
QVQLVQSGAEVKKPGASVKVSCKASGYAFSNFWMNWVRQAPGQGLEWMGQIYPGDGDTNYNGKFKGRVTMTRDTSTSTVYMELSSLRSEDTAVYYCARSYYRSAWFAYWGQGTLVTVSS

SEQ ID NO: 307 - protein, 119 aa, Artificial Sequence
  Description of Artificial Sequence: Synthetic polypeptide
QVQLVQSGAEVKKPGASVKVSCKASGYAFSNFWMNWVRQAPGQGLEWMGQIYPGDGDTNYNGKFKGRVTMTRDTSISTAYMELSRLRSDDTAVYYCARSYYRSAWFAYWGQGTLVTVSS

SEQ ID NO: 308 - protein, 119 aa, Artificial Sequence
  Description of Artificial Sequence: Synthetic polypeptide
QVQLVQSGAEVKKPGATVKISCKVSGYAFSNFWMNWVQQAPGKGLEWMGQIYPGDGDTNYNGKFKGRVTITADTSTDTAYMELSSLRSEDTAVYYCARSYYRSAWFAYWGQGTLVTVSR

SEQ ID NO: 309 - protein, 119 aa, Artificial Sequence
  Description of Artificial Sequence: Synthetic polypeptide
EVQLVQSGAEVKKPGESLKISCKGSGYAFSNFWMNWVRQMPGKGLEWMGQIYPGDGDTNYNGKFKGQVTISADKSISTAYLQWSSLKASDTAMYYCARSYYRSAWFAYWGQGTLVTVSL

SEQ ID NO: 310 - protein, 107 aa, Artificial Sequence
  Description of Artificial Sequence: Synthetic polypeptide
EIVLTQSPDFQSVTPKEKVTITCRASQSIGTSIHWYQQKPDQSPKLLIKYASESISGVPSRFSGSGSGTDFTLTINSLEAEDAATYYCQQSNNWPLTFGQGTKVEIK

SEQ ID NO: 311 - protein, 107 aa, Artificial Sequence
  Description of Artificial Sequence: Synthetic polypeptide
EIVMTQSPATLSVSPGERATLSCRASQSIGTSIHWYQQKPGQAPRLLIYYASESISGIPARFSGSGSGTEFTLTISSLQSEDFAVYYCQQSNNWPLTFGGGTKVEIK

SEQ ID NO: 312 - protein, 107 aa, Artificial Sequence
  Description of Artificial Sequence: Synthetic polypeptide
EIVLTQSPATLSLSPGERATLSCRASQSIGTSIHWYQQKPGQAPRLLIYYASESISGIPARFSGSGSGTDFTLTISSLEPEDFAVYYCQQSNNWPLTFGGGTKVEIK

SEQ ID NO: 313 - protein, 107 aa, Artificial Sequence
  Description of Artificial Sequence: Synthetic polypeptide
AIQLTQSPSSLSASVGDRVTITCRASQSIGTSIHWYQQKPGKAPKLLIYYASESISGVPSRFSGSGSGTDFTLTISSLQPEDFATYYCQQSNNWPLTFGGGTKVEIK

SEQ ID NO: 314 - protein, 107 aa, Artificial Sequence
  Description of Artificial Sequence: Synthetic polypeptide
DIVMTQSPSLLSASTGDRVTISCRASQSIGTSIHWYQQKPGKAPELLIYYASESISGVPSRFSGSGSGTDFTLTISCLQSEDFATYYCQQSNNWPLTFGQGTKVEIK

SEQ ID NO: 315 - protein, 113 aa, Artificial Sequence
  Description of Artificial Sequence: Synthetic polypeptide
QVQLQESGPGLVKPSQTLSLTCTVSGYSIVSHYYWSWIRQHPGKGLEWIGYISSDGSNYYNPSLKSLVTISVDTSKNQFSLKLSSVTAADTAVYYCVRGVDYWGQGTMVTVSS

SEQ ID NO: 316 - DNA, 339 bp, Artificial Sequence
  Description of Artificial Sequence: Synthetic polynucleotide
caggtgcaactgcaggaatcaggtccaggcttggtcaagccatcgcagactcttagtctgacatgcaccgtgagtggctatagcatcgtgtcgcactattattggtcttggatcaggcagcatccaggaaagggactggagtggatcgggtacattagcagcgatgggagcaactattacaacccatctctgaagtccctggtaactattagcgtggatacaagcaaaaatcagttttcattaaagctctcttcagtgaccgcagctgataccgccgtctattattgcgtgcggggggtggactactggggtcagggcaccatggttactgtgtcatca

SEQ ID NO: 317 - protein, 113 aa, Artificial Sequence
  Description of Artificial Sequence: Synthetic polypeptide
QVQLQESGPGLVKPSDTLSLTCAVSGYSIVSHYYWGWIRQPPGKGLEWIGYISSDGSNYYNPSLKSRVTMSVDTSKNQFSLKLSSVTAVDTAVYYCVRGVDYWGQGTMVTVSS

SEQ ID NO: 318 - DNA, 339 bp, Artificial Sequence
  Description of Artificial Sequence: Synthetic polynucleotide
caggtacagctgcaggagagtggccctggtttagtaaagccatcagatacactttcacttacctgcgccgtgtctggttattctatcgtgagccactattactggggatggatccgccagccccctggcaaaggtcttgagtggattggctatataagttcggatggcagtaactattacaatccttctctgaagagccgtgtcactatgagcgtggacactagcaaaaaccagttcagcctgaagctgtcctccgtcaccgccgtagacaccgctgtctactattgtgttaggggggtggactactggggccaaggcaccatggtcacggtgagcagc

SEQ ID NO: 319 - protein, 113 aa, Artificial Sequence
  Description of Artificial Sequence: Synthetic polypeptide
EVQLVESGGGLVQPGGSLRLSCAASGYSIVSHYYMSWVRQAPGKGLEWVSVISSDGSNYYADSVKGRFTISRDNSKNTLYLQMNSLRAEDTAVYYCVRGVDYWGQGTLVTVSS

SEQ ID NO: 320 - skipped

SEQ ID NO: 321 - protein, 113 aa, Artificial Sequence
  Description of Artificial Sequence: Synthetic polypeptide
EVQLVESGGGLVQPGRSLRLSCAASGYSIVSHYYMHWVRQAPGKGLEWVSAISSDGSNEYADSVEGRFTISRDNAKNSLYLQMNSLRAEDTAVYYCVRGVDYWGQGTLVTVSS

SEQ ID NO: 322 - DNA, 339 bp, Artificial Sequence
  Description of Artificial Sequence: Synthetic polynucleotide
gaggtgcagctcgtcgagtccggaggcggtctggtgcaacccggccgttctttgcggctgagttgcgctgccagtgggtatagcatcgtgagtcactattacatgcattgggttcgtcaagcccctggcaagggactagagtgggtgtccgccatctcctcagacggtagtaatgagtacgcggacagcgtagagggtagattcaccatttctcgggacaatgccaaaaatagtctatacctccaaatgaattcccttagggccgaagacactgccgtgtactactgtgttcggggcgtggactactgggggcaggggacattggtgactgtgagctca

SEQ ID NO: 323 - protein, 113 aa, Artificial Sequence
  Description of Artificial Sequence: Synthetic polypeptide
QVQLQESGPGLVKPSQTLSLTCTVSGYSIVSHYYWSWIRQHPGKGLEWIGYISSDGSNEYNPSLKSLVTISVDTSKNQFSLKLSSVTAADTAVYFCVRGVDYWGQGTMVTVSS

SEQ ID NO: 324 - DNA, 339 bp, Artificial Sequence
  Description of Artificial Sequence: Synthetic polynucleotide
caggtccaactgcaggaatctggccccggactggttaaaccatctcagacactctccctgacctgcaccgtgtctggatacagcatcgtttctcattattactggtcatggattaggcagcatcccggaaaagggcttgaatggattggctacatctcctccgacggctccaatgagtacaacccatcacttaaatctctggtcacgataagcgtagacacatctaaaaatcagttctcattaaagctcagctctgttacagctgccgacaccgctgtgtacttctgtgtgcgaggggttgactactgggggcagggcacaatggtgacagtgtcttcc

SEQ ID NO: 325 - protein, 113 aa, Artificial Sequence
  Description of Artificial Sequence: Synthetic polypeptide
QVQLVQSGAEVKKPGSSVKVSCKASGYSIVSHYYISWVRQAPGQGLEWMGGISSDGSNNYAQKFQGRVTITADESTSTAYMELSSLRSEDTAVYYCVRGVDYWGQGTLVTVSS

SEQ ID NO: 326 - DNA, 339 bp, Artificial Sequence
  Description of Artificial Sequence: Synthetic polynucleotide
caggttcaactggttcagtccggagccgaggtcaaaaagcctggatcctctgtgaaggtgtcatgtaaggcttctggctacagcatcgtctcacattattacatatcttgggtgcgacaggcccccggccaggggctcgagtggatgggaggtatttcctccgacgggagtaacaattacgctcagaaatttcagggccgggtgaccattaccgccgacgaaagtacaagcaccgcttatatggaattaagctctttaagatcagaggacacggctgtgtactactgtgtaaggggcgtggattactggggtcaggggacgctcgtcaccgtctcgagc

SEQ ID NO: 327 - protein, 113 aa, Artificial Sequence
  Description of Artificial Sequence: Synthetic polypeptide
QVQLQESGPGLVKPSETLSLTCTVSGYSIVSHYYWSWIRQPPGKGLEWIGYISSDGSNNYNPSLKSRVTISVDTSKNQFSLKLSSVTAADTAVYYCVRGVDYWGQGTTVTVSS

SEQ ID NO: 328 - DNA, 339 bp, Artificial Sequence
  Description of Artificial Sequence: Synthetic polynucleotide
caggtccagctccaggaatccggcccagggttggtgaagccttcggagaccctgtctctgacatgcacagtcagcggctatagtatcgtctcccactattattggtcttggattcggcaacctccaggcaaggggttagaatggattggatacatctcaagcgatgggtccaataactacaacccaagtctcaaaagtagagtgactatctctgtggataccagtaaaaaccagttttcactcaagttgagttccgtcaccgccgccgacacagccgtttactactgtgttcggggagtggactactggggccaaggtaccacggttaccgtgagcagc

SEQ ID NO: 329 - protein, 106 aa, Artificial Sequence
  Description of Artificial Sequence: Synthetic polypeptide
DIQMTQSPSSLSASVGDRVTITCQASRDINNFLNWYQQKPGKAPKLLIYRANNLETGVPSRFSGSGSGTDFTFTISSLQPEDIATYFCLQYGDLYTFGGGTKVEIK

SEQ ID NO: 330 - DNA, 318 bp, Artificial Sequence
  Description of Artificial Sequence: Synthetic polynucleotide
gacatacagatgactcagagcccctcctcactctcggcatcagtcggcgacagggtcacaattacctgtcaggcttctcgcgacattaataacttcctgaattggtatcagcaaaagcccgggaaggcccctaagctgttgatttatagagcaaataatctcgaaaccggcgtgcccagtaggtttagcgggtccgggagcggaacagacttcacattcaccatttctagtttgcagcccgaagacattgctacatatttttgcctgcagtacggggatctctacactttcgggggcggaacaaaggttgagataaaa

SEQ ID NO: 331 - protein, 106 aa, Artificial Sequence
  Description of Artificial Sequence: Synthetic polypeptide
DIQMTQSPSSLSASVGDRVTITCQASRDINNFLNWYQQKPGKAPKLLIYRANNLETGVPSRFSGSGSGTDFTFTISSLQPEDIATYYCLQYGDLYTFGGGTKVEIK

SEQ ID NO: 332 - DNA, 318 bp, Artificial Sequence
  Description of Artificial Sequence: Synthetic polynucleotide
gatattcaaatgacgcagtcaccctcatcgctctctgcgtcagtaggggatcgtgtcacgataacctgtcaagcatcaagggacatcaacaacttcctcaactggtaccaacagaagcctggcaaggcacctaaactcctgatctaccgggctaacaacctagaaaccggggttccgagccgattcagtgggtctggaagcgggacagactttacgttcactattagttcgctacagcccgaagacattgcgacatattactgtcttcagtatggggatttgtatacctttgggggaggcaccaaggtagagataaag

SEQ ID NO: 333 - protein, 106 aa, Artificial Sequence
  Description of Artificial Sequence: Synthetic polypeptide
DIQMTQSPSSLSASVGDRVTITCRASRDINNFLGWYQQKPGKAPKRLIYRANSLQSGVPSRFSGSGSGTEFTLTISSLQPEDFATYYCLQYGDLYTFGQGTKVEIK

SEQ ID NO: 334 - DNA, 318 bp, Artificial Sequence
  Description of Artificial Sequence: Synthetic polynucleotide
gacatccagatgactcagagcccgtcttctctatccgcaagtgtaggcgatcgtgtcaccatcacatgccgggcttcccgggatatcaacaacttccttgggtggtatcagcagaagcccggaaaagcccccaaacggctcatctacagagcgaattccctgcagtcaggtgtccccagtaggttcagcggatcaggctcggggaccgaattcactctgaccattagctcactgcagcctgaggatttcgctacttactattgcctgcaatacggcgatctgtacactttcgggcagggcaccaaggtggaaataaaa

SEQ ID NO: 335 - protein, 106 aa, Artificial Sequence
  Description of Artificial Sequence: Synthetic polypeptide
EIVLTQSPGTLSLSPGERATLSCRASRDINNFLAWYQQKPGQAPRLLIYRANSRATGIPDRFSGSGSGTDFTLTISRLEPEDFAVYYCLQYGDLYTFGQGTKVEIK

SEQ ID NO: 336 - DNA, 318 bp, Artificial Sequence
  Description of Artificial Sequence: Synthetic polynucleotide
gaaatcgtactgacccagtctcccggaaccctgagtctctcacccggcgagcgcgcaacactgtcgtgtagggccagtagggacataaataacttcctagcctggtaccaacaaaaaccgggtcaggctccaagactgttgatctatagagctaactccagggccaccggcatcccagaccgattctcaggctccggatctggaaccgacttcacgctcaccattagccgactagaacctgaggactttgctgtatactattgcctgcagtacggcgacctgtatacctttggacagggtaccaaggtcgagatcaag

SEQ ID NO: 337 - protein, 106 aa, Artificial Sequence
  Description of Artificial Sequence: Synthetic polypeptide
EIVLTQSPATLSLSPGERATLSCRASRDINNFLAWYQQKPGQAPRLLIYRANNRATGIPARFSGSGPGTDFTLTISSLEPEDFAVYYCLQYGDLYTFGGGTKVEIK

SEQ ID NO: 338 - DNA, 318 bp, Artificial Sequence
  Description of Artificial Sequence: Synthetic polynucleotide
gagatcgtacttacgcagagcccagcaactctgtctctgtcccccggagaacgggccaccctgtcgtgccgggccagccgtgatattaataatttcctggcctggtatcaacaaaaaccggggcaggctcctcgactgttgatctaccgggccaacaatagagcaactggtatccctgctcgcttctccggcagtgggccaggtacagacttcaccctgactatttcgtcactcgaaccagaagactttgccgtgtattattgcttacaatacggggatctgtacactttcggaggaggaactaaggtcgaaattaag

SEQ ID NO: 339 - protein, 106 aa, Artificial Sequence
  Description of Artificial Sequence: Synthetic polypeptide
EIVLTQSPDFQSVTPKEKVTITCRASRDINNFLHWYQQKPDQSPKLLIKRANQSFSGVPSRFSGSGSGTDFTLTINSLEAEDAATYYCLQYGDLYTFGQGTKVEIK

SEQ ID NO: 340 - DNA, 318 bp, Artificial Sequence
  Description of Artificial Sequence: Synthetic polynucleotide
gagatcgtgctgacccagagccccgacttccagagcgtgacccccaaggagaaggtgaccatcacctgcagagccagcagagacatcaacaacttcctgcactggtaccagcagaagcccgaccagagccccaagctgctgatcaagagagccaaccagagcttcagcggcgtgcccagcagattcagcggcagcggcagcggcaccgacttcaccctgaccatcaacagcctggaggccgaggacgccgccacctactactgcctgcagtacggcgacctgtacaccttcggccagggcaccaaggtggagatcaag

SEQ ID NO: 341 - protein, 106 aa, Artificial Sequence
  Description of Artificial Sequence: Synthetic polypeptide
DIQMTQSPSSLSASVGDRVTITCRASRDINNFLAWFQQKPGKAPKSLIYRANSLQSGVPSRFSGSGSGTDFTLTISSLQPEDFATYYCLQYGDLYTFGGGTKVEIK

SEQ ID NO: 342 - DNA, 318 bp, Artificial Sequence
  Description of Artificial Sequence: Synthetic polynucleotide
gacatccagatgacccagagccccagcagcctgagcgccagcgtgggcgacagagtgaccatcacctgcagagccagcagagacatcaacaacttcctggcctggttccagcagaagcccggcaaggcccccaagagcctgatctacagagccaacagcctgcagagcggcgtgcccagcagattcagcggcagcggcagcggcaccgacttcaccctgaccatcagcagcctgcagcccgaggacttcgccacctactactgcctgcagtacggcgacctgtacaccttcggcggcggcaccaaggtggagatcaag

SEQ ID NO: 343 - protein, 234 aa, Artificial Sequence
  Description of Artificial Sequence: Synthetic polypeptide
DIKMAQSPSSVNASLGERVTITCKASRDINNFLSWFHQKPGKSPKTLIYRANRLVDGVPSRFSGSGSGQDYSFTISSLEYEDVGIYYCLQYGDLYTFGGGTKLEIKGGGGSGGGGSGGGGSDVQLLESGPGLVRPSQSLSLTCSVTGYSIVSHYYWNWIRQFPGNKLEWMGYISSDGSNEYNPSLKNRISISLDTSKNQFFLKFDFVTTADTATYFCVRGVDYWGQGTTLTVSS

SEQ ID NO: 344 - DNA, 702 bp, Artificial Sequence
  Description of Artificial Sequence: Synthetic polynucleotide
gacatcaagatggctcagtccccttctagcgtgaatgcttcgctaggggagcgtgtgaccatcacatgtaaagcatcacgcgacataaataatttcctttcctggtttcatcagaaaccgggcaagtcgcctaagacgctgatttacagagcaaatcggttggtagatggagtgccaagcagattcagcgggagcggaagtggacaggattatagcttcactatttcatccctggaatacgaggacgtaggtatctattattgcctccagtatggcgatctttacacatttggtggggggactaagctggagattaagggcggaggcggaagcggaggcggaggctccggcggaggcggaagcgacgtgcaacttctggagagcgggccagggctagtcaggccctcccagtcgctttcactgacttgcagtgtgaccggttactctattgtgagtcactactattggaactggattcggcagttcccaggcaacaaactggaatggatggggtacatatcttccgatggctcgaatgaatataacccatcattgaaaaatcgtatttccatcagtctggatacgagtaaaaaccagtttttcctcaaattcgatttcgtgactacagcagatactgccacatacttctgtgtacgaggtgtcgattattggggacagggcacaacgctgaccgtaagttct

SEQ ID NO: 345 - protein, 119 aa, Artificial Sequence
  Description of Artificial Sequence: Synthetic polypeptide
EVQLVESGGGLVQPGGSLRLSCAASGFTFSSYAMSWVRQAPGKGLEWVSAISRGGTTYYADSVKGRFTISRDNSKNTLYLQMNSLRAEDTAVYYCGRYDYDGYYAMDYWGQGTLVTVSS

SEQ ID NO: 346 - DNA, 357 bp, Artificial Sequence
  Description of Artificial Sequence: Synthetic polynucleotide
gaggtgcagctcgtggaatccggcggtggcctggtgcagccgggcggcagtcttcgactctcctgtgcggcgtcaggctttacgttcagttcttatgccatgagctgggtgaggcaagctcccggtaagggactggagtgggtctctgctatcagccggggaggtacgacctactacgctgactccgtaaaaggaagatttaccataagtcgtgacaattccaaaaacactctatacttacagatgaactcgctcagggccgaagataccgcagtctactattgtgggagatacgattacgacggctactatgctatggattattggggtcagggtacgctcgtgacggtgtcctcc

SEQ ID NO: 347 - protein, 107 aa, Artificial Sequence
  Description of Artificial Sequence: Synthetic polypeptide
DIQMTQSPSSLSASVGDRVTITCQASPDINSYLNWYQQKPGKAPKLLIYRANNLETGVPSRFSGSGSGTDFTLTISSLQPEDIATYYCLQYDEFPYTFGQGTKLEIK

SEQ ID NO: 348 - DNA, 321 bp, Artificial Sequence
  Description of Artificial Sequence: Synthetic polynucleotide
gatattcaaatgacgcaaagtcccagcagcctctccgcctccgttggagacagggtgactattacatgccaagccagccccgatattaatagctacttaaattggtatcagcagaaacctgggaaggcacctaaacttctcatctaccgcgctaacaatctggagaccggcgtgccgtctagattttccggctctggatcagggaccgattttactctgacaattagttccctgcaacccgaagacatcgccacttattattgcctgcaatatgatgagtttccttacacatttggtcagggaactaaactagagattaag

SEQ ID NO: 349 - protein, 119 aa, Artificial Sequence
  Description of Artificial Sequence: Synthetic polypeptide
EVQLVESGGGLVQPGGSLRLSCAASGFTFSSYAMSWVRQAPGKGLEWVSSISRGGTTYYPDSVKGRFTISRDNSKNTLYLQMNSLRAEDTAVYYCGRYDYDGYYAMDYWGQGTLVTVSS

SEQ ID NO: 350 - DNA, 357 bp, Artificial Sequence
  Description of Artificial Sequence: Synthetic polynucleotide
gaagtgcaactggtcgagtctgggggcggccttgtgcaacctggaggcagccttcgactcagttgcgccgcgtctggttttaccttctcctcttacgcgatgagctgggttcgccaggcccccggcaagggacttgagtgggttagttcgatctcccgcggaggcaccacatattatcctgactcggttaagggacgcttcactatctctagggacaattcaaagaacacactgtatctccaaatgaactccttgcgggccgaggacactgctgtgtattattgcggacgatacgactacgatgggtattacgccatggattactgggggcaaggtacactggtcactgtgagttcg

SEQ ID NO: 351 - protein, 107 aa, Artificial Sequence
  Description of Artificial Sequence: Synthetic polypeptide
DIQMTQSPSSLSASVGDRVTITCKASPDINSYLSWYQQKPGKAPKLLIYRANRLVDGVPSRFSGSGSGTDFTLTISSLQPEDIATYYCLQYDEFPYTFGQGTKLEIK

SEQ ID NO: 352 - DNA, 321 bp, Artificial Sequence
  Description of Artificial Sequence: Synthetic polynucleotide
gatattcagatgacccagtcaccttcgagtctgagcgcatccgtgggcgacagagtgaccattacctgtaaggccagcccggacattaacagctacctatcgtggtatcagcaaaagcctggtaaggcccctaaactccttatctacagggctaataggttggtagacggggtgcctagccggttctctggttccggcagcggtacggactttactctgaccataagctctctgcaaccagaagacatcgcaacatactactgtttacaatacgacgaatttccttatacctttggccaggggaccaagttagagatcaag

SEQ ID NO: 353 - protein, 119 aa, Artificial Sequence
  Description of Artificial Sequence: Synthetic polypeptide
EVQLVESGGGLVQPGGSLRLSCAASGFTFSSYAIIWVRQAPGKGLEWVARISRGGTTRYADSVKGRFTISADTSKETAYLQMNSLRAEDTAVYYCGRYDYDGYYAMDYWGQGTLVTVSS

SEQ ID NO: 354 - DNA, 357 bp, Artificial Sequence
  Description of Artificial Sequence: Synthetic polynucleotide
gaggttcagctggtcgagtccgggggaggcttagtgcagccaggaggcagtctgcggctctcttgcgctgcaagtggcttcacattcagttcatacgcaatcatctgggttcgacaggctcctggtaagggcctcgaatgggtcgcaaggatatcacgaggtggaaccactagatacgcagactctgttaagggcaggttcacaattagcgcggatacctccaaggagactgcttatttacagatgaactctctgagagccgaggacactgctgtttactactgcggccgatacgattacgacggatattacgcaatggattactggggccagggcacgctggtgacagtttcatcg

SEQ ID NO: 355 - protein, 107 aa, Artificial Sequence; identical to SEQ ID NO: 351
  Description of Artificial Sequence: Synthetic polypeptide

SEQ ID NO: 356 - DNA, 321 bp, Artificial Sequence
  Description of Artificial Sequence: Synthetic polynucleotide
gatatccagatgactcagagtcccagtagcctgtcggcaagcgtcggagatcgggtcacaattacctgcaaagctagtcctgatattaattcttacttgtcctggtatcagcagaagcctggtaaggcccctaagttgctcatctatcgggctaaccggctggtggacggtgttccctctagattctcagggagtggaagcggcactgacttcaccctgactatatcgagccttcagccagaggacattgccacatactactgtctgcaatatgatgaatttccatatacattcggacaaggtacaaagttagaaattaag

SEQ ID NO: 357 - protein, 119 aa, Artificial Sequence; identical to SEQ ID NO: 353
  Description of Artificial Sequence: Synthetic polypeptide

SEQ ID NO: 358 - DNA, 357 bp, Artificial Sequence
  Description of Artificial Sequence: Synthetic polynucleotide
gaagtccaactggtggagtctggcgggggcttggtgcagcccggtggctcccttaggctgtcttgcgctgccagcgggttcacattcagctcctatgcgattatatgggtccgacaggcacccggcaagggattggagtgggtggctcgcatcagcagaggcggcactactcgttacgccgactccgtgaaaggcagattcaccatcagtgcagacacatccaaggaaaccgcatatcttcagatgaatagcctgcgagcggaggataccgccgtctattattgcggacgctatgattacgacggttattatgctatggactactggggccagggcacacttgtgaccgtcagtagc

SEQ ID NO: 359 - protein, 107 aa, Artificial Sequence
  Description of Artificial Sequence: Synthetic polypeptide
DIQMTQSPSSLSASVGDRVTITCRASPDINSYVAWYQQKPGKAPKLLIYRANFLESGVPSRFSGSRSGTDFTLTISSLQPEDFATYYCLQYDEFPYTFGQGTKVEIK

SEQ ID NO: 360 - DNA, 321 bp, Artificial Sequence
  Description of Artificial Sequence: Synthetic polynucleotide
gacattcaaatgacgcaaagccctagtagcttgtcagcttctgtgggggaccgtgtcacaatcacttgtcgggcctctccagatataaactcctacgttgcttggtatcagcagaagcccggaaaggctccgaaattgttgatttatcgcgctaatttcttagagtcaggagtgcccagccggttctcagggtctcgctctggaaccgacttcacactcactatttctagcctacagcctgaggattttgcaacttactactgtctacagtacgacgagtttccgtacactttcggacaggggaccaaggtggagatcaag

SEQ ID NO: 361 - protein, 119 aa, Artificial Sequence
  Description of Artificial Sequence: Synthetic polypeptide
QVQLVQSGGGLVKPGGSLRLSCAASGFTFSSYAMSWVRQIPGKGLEWVSSISRGGTTYYPDSVKGRFTISRDNVKNTLYLQMSSLRAEDTAVYYCGRYDYDGYYAMDYWGQGTMVTVSS

SEQ ID NO: 362 - DNA, 357 bp, Artificial Sequence
  Description of Artificial Sequence: Synthetic polynucleotide
caagtacagctcgtgcagagcggcggtggcctggtgaagccaggaggtagtcttagactgagctgtgcggcttctggtttcacgttcagcagttatgctatgtcctgggttaggcaaatccccggcaaaggattggagtgggttagcagtatctcaagggggggaaccacatattatcctgactctgtcaaaggacggtttacaatcagccgcgataacgttaaaaataccctctacctccagatgtcttcgctccgcgctgaagatacagcggtttactactgtggcagatacgactacgacggttattacgccatggactactggggacagggaactatggtcacagttagctct

SEQ ID NO: 363 - protein, 107 aa, Artificial Sequence
  Description of Artificial Sequence: Synthetic polypeptide
DIKMTQSPSSLSASVGDRVTITCKASPDINSYLSWYQQKPGKAPKTLIYRANRLVDGVPSRFSGSGSGTDFTLTISSLQYEDMAIYYCLQYDEFPYTFGDGTKVEIK

SEQ ID NO: 364 - DNA, 321 bp, Artificial Sequence
  Description of Artificial Sequence: Synthetic polynucleotide
gacatcaaaatgacgcagtcacctagtagcctctccgcctcggttggcgatcgggtaaccattacctgcaaagcatctccagacataaatagttatcttagttggtatcaacagaaacctggcaaagctcctaagaccctcatctaccgcgctaaccgcctcgtggatggtgttccaagtcggttctcaggaagcggcagtggcacagactttacactgacaattagttccctccagtatgaggatatggccatatattactgccttcagtatgatgagtttccatacacattcggagacggtacaaaggtggagatcaag

SEQ ID NO: 365 - protein, 119 aa, Artificial Sequence
  Description of Artificial Sequence: Synthetic polypeptide
QVSLRESGGGLVQPGRSLRLSCTASGFTFSSYAMTWVRQAPGKGLEWVASISRGGTTHFADSVKGRFTISRDNSNNTLYLQMDNVRDEDTAIYYCGRYDYDGYYAMDYWGRGTLVTVSS

SEQ ID NO: 366 - DNA, 357 bp, Artificial Sequence
  Description of Artificial Sequence: Synthetic polynucleotide
caagtgagcctccgggagagtgggggcggtctggtccaaccaggacggtcactgcggctgtcatgcactgccagcggcttcacatttagctcttacgccatgacttgggtccgccaagctcccggtaagggactggagtgggtggccagcattagcaggggtggtacaacccacttcgcggattcagttaaggggagattcactatctccagggataattccaacaacacgctgtaccttcagatggataacgtgagagacgaggataccgcgatatactactgtggccgctatgactacgatggttattatgctatggattactgggggcggggcaccctggtgactgtgtcctcg

SEQ ID NO: 367 - protein, 107 aa, Artificial Sequence
  Description of Artificial Sequence: Synthetic polypeptide
DIVMTQSPSSLSASVGDRVTITCRASPDINSYLAWYQQKPGKAPKLLIYRANSLQSGVPSRFSGSGSGTEFTLTISSLQPEDFATYYCLQYDEFPYTFGQGTKLEMK

SEQ ID NO: 368 - DNA, 321 bp, Artificial Sequence
  Description of Artificial Sequence: Synthetic polynucleotide
gatatcgtgatgacacagtcacctagctccctgagcgcaagcgtgggggatagggttaccataacttgcagggccagtcccgacatcaatagttatttggcctggtatcaacagaagcctgggaaggcacctaagttgcttatttatagggctaactcgttacagagcggtgtgccaagtcggttctcaggctcagggtccgggaccgagttcaccctgaccatcagtagcttgcagccagaagattttgccacctactactgtcttcaatacgatgagtttccttacacttttggacagggcaccaaactagagatgaag

SEQ ID NO: 369 - protein, 119 aa, Artificial Sequence
  Description of Artificial Sequence: Synthetic polypeptide
QVQLVESGGGVVQPGRSLRLSCAASGFTFSSYAMNWVRQAPAKGLEWVAIISRGGTQYYADSVKGRFTISRDNSKNTLYLQMNGLRAEDTAVYYCGRYDYDGYYAMDYWGQGTLVTVSS

SEQ ID NO: 370 - DNA, 357 bp, Artificial Sequence
  Description of Artificial Sequence: Synthetic polynucleotide
caggttcaactggtagaatccggcggaggtgtagtgcagcctggaaggtcattacggttaagttgcgccgcctccgggttcacatttagcagctatgctatgaactgggtgcgccaggcccctgcgaaaggactcgaatgggttgccatcatcagccgaggaggcacacagtattatgccgattctgtgaagggtcgttttactatttccagagacaacagtaaaaatacgctgtacctgcaaatgaacggattgagggctgaggataccgccgtgtactactgtggacgctacgactatgatgggtactacgcgatggactattgggggcaaggaacccttgtaaccgttagttca

SEQ ID NO: 371 - protein, 107 aa, Artificial Sequence
  Description of Artificial Sequence: Synthetic polypeptide
EIVLTQSPDFQSVTPKEKVTITCRASPDINSYLSWYQQKPDQSPKLLIKRANQSFSGVPSRFSGSGSGTDFTLTINSLEAEDAAAYYCLQYDEFPYTFGPGTKVDIK

SEQ ID NO: 372 - DNA, 321 bp, Artificial Sequence
  Description of Artificial Sequence: Synthetic polynucleotide
gagatcgttttgacacagagccccgatttccagagcgtcacgcccaaggagaaggtcaccatcacctgccgagccagccccgacatcaacagttatctttcatggtatcaacagaaacctgatcagagccctaagctgctgattaagcgcgccaaccagagcttctcaggggttccttcacggttttccgggtcaggcagcgggactgacttcacgttgaccattaactctttggaggctgaggatgctgctgcctattactgccttcagtacgacgagttcccctatacatttggtcctggaacaaaagtggatataaag

SEQ ID NO: 373 - protein, 119 aa, Artificial Sequence
  Description of Artificial Sequence: Synthetic polypeptide
QVQLVQSGAEVKKPGASVKVSCKASGFTFSSYAMHWVRQAPGQGLEWMGNISRGGTTNYAEKFKNRVTMTRDTSISTAYMELSRLRSDDTAVYYCGRYDYDGYYAMDYWGQGTLVTVSS

SEQ ID NO: 374 - DNA, 357 bp, Artificial Sequence
  Description of Artificial Sequence: Synthetic polynucleotide
caggtgcagctcgtccagagcggagccgaagtgaagaagccgggagcatcagtgaaagtttcctgcaaagcaagtggcttcactttcagcagttacgcgatgcactgggtgcggcaggcaccaggtcagggactggaatggatggggaacatctctcgcggcggaacaaccaattacgcagagaagtttaagaatcgcgttacgatgaccagagacacttctattagtacagcctatatggagttgtcgcgtctgagaagcgacgataccgctgtctactattgcggccggtacgattatgacggctactatgcaatggattactggggacagggcacacttgtgacagtgtctagt

SEQ ID NO: 375 - protein, 107 aa, Artificial Sequence
  Description of Artificial Sequence: Synthetic polypeptide
DIVMTQSPLSLPVTPGEPASISCRSSPDINSYLEWYLQKPGQSPQLLIYRANDRFSGVPDRFSGSGSGTDFTLKISRVEAEDVGVYYCLQYDEFPYTFGQGTKVEIK

SEQ ID NO: 376 - DNA, 321 bp, Artificial Sequence
  Description of Artificial Sequence: Synthetic polynucleotide
gacattgtgatgactcagtctccactcagcctgcctgtcacgcccggcgaacccgcttctatctcttgtaggagtagccctgatatcaacagctacctcgaatggtatctccagaaacctggtcagagcccccagctcttgatctatagagcaaacgacaggttctctggcgtgcctgataggttttccggtagtggcagcggaaccgacttcacacttaagatttcaagggtcgaggccgaggacgtgggggtgtattactgcttacagtacgatgagtttccgtatacattcgggcaaggcacaaaggtggaaattaag

SEQ ID NO: 377 - protein, 119 aa, Artificial Sequence
  Description of Artificial Sequence: Synthetic polypeptide
EVQLVESGGGLVQPGGSLRLSCTGSGFTFSSYAMHWLRQVPGEGLEWVSGISRGGTIDYADSVKGRFTISRDDAKKTLSLQMNSLRAEDTAVYYCGRYDYDGYYAMDYWGQGTMVTVSS

SEQ ID NO: 378 - DNA, 357 bp, Artificial Sequence
  Description of Artificial Sequence: Synthetic polynucleotide
gaagtgcaactggtcgaaagtggagggggactagtgcagcccggagggtcactgaggctatcatgcaccggctctggttttactttttccagctatgccatgcactggctcagacaggttccgggggaaggactggagtgggttagcggaatctccagaggcggaactattgactacgcagacagcgtgaaaggtaggtttaccatcagcagggacgatgctaaaaagaccctgtcacttcaaatgaatagcctgagagctgaggatacggccgtgtattactgtggacgctatgactacgatggatattacgcaatggactactggggccagggaacaatggtgaccgtctcaagc

SEQ ID NO: 379 - protein, 107 aa, Artificial Sequence
  Description of Artificial Sequence: Synthetic polypeptide
EIVLTQSPATLSVSPGERATLSCRASPDINSYLAWYQQKPGQAPRLLFSRANNRATGIPARFTGSGSGTDFTLTISSLEPEDFAIYYCLQYDEFPYTFGQGTKVEIK

SEQ ID NO: 380 - DNA, 321 bp, Artificial Sequence
  Description of Artificial Sequence: Synthetic polynucleotide
gagatcgtcctgacccagagcccagctactttgtcagtttcgccaggcgagcgggccacactgagctgtagggcttctcctgatatcaattcttacctggcctggtatcaacagaaaccgggacaggcccctcgcctgctgttctcccgcgccaacaatagggcgactggcataccagctcggtttactgggagtgggtcaggcactgatttcacgcttacaatcagtagcctggagcccgaagacttcgccatctactactgtttacaatacgatgagttcccctataccttcggccaagggaccaaggtggagatcaag

SEQ ID NO: 381 - protein, 119 aa, Artificial Sequence
  Description of Artificial Sequence: Synthetic polypeptide
EVQLVESGGGVVQPGRSLRLSCAASGFTFSSYAMSWVRQAPGKGLEWVASISRGGTQYYADSVKGRFTISRDNSKNTLYLQMNGLRAEDTAVYYCGRYDYDGYYAMDYWGQGTLVTVSS

SEQ ID NO: 382 - DNA, 357 bp, Artificial Sequence
  Description of Artificial Sequence: Synthetic polynucleotide
gaagtgcagctagtagaaagtggtggtggggtcgtgcagccaggccgctcgctcaggctgtcttgcgctgcgagtggtttcacattctcttcatacgccatgagctgggtgagacaggctcccggcaagggcctcgaatgggtcgcatctataagcagaggcggaacccagtactacgctgacagtgtgaagggtcgctttacaatctcacgggacaacagtaaaaacaccctctatctacagatgaatggcttgcgagctgaagacacggctgtgtattattgcgggcgctatgactatgatggttactacgctatggattactggggccagggcaccctggttactgtttcatca

SEQ ID NO: 383 - protein, 107 aa, Artificial Sequence
  Description of Artificial Sequence: Synthetic polypeptide
EIVLTQSPDFQSVTPKEKVTITCRASPDINSYLPWYQQKPDQSPKLLIKRANQSFSGVPSRFSGSGSGTDFTLTINSLEAEDAAAYYCLQYDEFPYTFGPGTKVDIK

SEQ ID NO: 384 - DNA, 321 bp, Artificial Sequence
  Description of Artificial Sequence: Synthetic polynucleotide
gaaatagtcctgacccagagcccagacttccagtccgtgacccctaaggagaaggttactatcacttgcagggcaagccctgacataaattcatacctgccatggtatcagcagaagccagaccagtcgccgaagctattaatcaaacgcgccaaccagtcttttagcggcgtaccatcccgattctcaggttcggggtccgggaccgatttcacactcacgataaactcccttgaggcagaggatgcagcggcttactactgtttacagtacgacgagtttccatatacgttcggccccggcacgaaggtagatatcaag

SEQ ID NO: 385 - protein, 119 aa, Artificial Sequence
  Description of Artificial Sequence: Synthetic polypeptide
EVQLVESGGGLVQPGGSLRLSCATSGFTFSSYAMSWMRQAPGKGLEWVASISRGGTTYYADSVKGRFTISVDKSKNTLYLQMNSLRAEDTAVYYCGRYDYDGYYAMDYWGQGTLVTVSS

SEQ ID NO: 386 - DNA, 357 bp, Artificial Sequence
  Description of Artificial Sequence: Synthetic polynucleotide
gaagtgcagctggtggagtctggcggcggtctggtgcagcccggcggctctctgcgcctctcctgtgccacctctggttttacattctcctcctacgctatgtcctggatgcggcaagcccccggcaagggcctagagtgggtcgcctcaatcagcaggggcgggacgacttattatgccgattcagttaaggggagattcacaatttccgtggataaatccaagaataccttatacctccagatgaactctctgcgggccgaagatacggccgtatattattgtgggaggtatgactacgacggatattacgccatggattattgggggcaggggacacttgttacagtgagttcc

SEQ ID NO: 387 - protein, 107 aa, Artificial Sequence
  Description of Artificial Sequence: Synthetic polypeptide
DIQMTQSPSSLSASVGDRVTITCKASPDINSYLNWYQQKPGKAPKLLIYRANRLVDGVPSRFSGSGSGTDYTLTISSLQPEDFATYYCLQYDEFPYTFGAGTKVEIK

SEQ ID NO: 388 - DNA, 321 bp, Artificial Sequence
  Description of Artificial Sequence: Synthetic polynucleotide
gatatacagatgacacagagcccttcaagtttatctgcaagcgtcggcgatcgtgttacaataacttgcaaggcatctcccgacatcaattcctacctcaactggtatcagcagaagcctgggaaggctcctaagctgcttatttacagagcaaatcgcctggtggacggcgtgcccagtcggttttccgggtctgggagcggaacggattacacactgaccatctcaagcctgcaacccgaagacttcgctacatattactgccttcagtatgatgagttcccatataccttcggcgctgggaccaaggtggagataaag

SEQ ID NO: 389 - protein, 119 aa, Artificial Sequence
  Description of Artificial Sequence: Synthetic polypeptide
EVQLVESGGGLVQPGGSLRLSCASSGFTFSSYAMSWRRQAPGKGLEWVAGISRGGTTSYADSVKGRFTISSDDSKNTLYLQMNSLRAEDTAVYYCGRYDYDGYYAMDYWGQGTLVTVSS

SEQ ID NO: 390 - DNA, 357 bp, Artificial Sequence
  Description of Artificial Sequence: Synthetic polynucleotide
gaggtccagctcgtcgaatctggcggaggtttagtgcaaccaggcgggtcgctccgattaagttgtgcgtccagtggcttcaccttctccagctacgccatgtcgtggaggcgacaggctcctggcaaaggcttggagtgggttgctggtatctcccgaggaggcaccactagttacgctgacagtgtaaaaggacgtttcactatttcctctgacgacagcaagaacacactctatctgcaaatgaatagtctccgtgctgaggacacagccgtgtattattgcgggcggtatgattacgacggctactacgctatggactactggggccagggaactctggtcactgtgagctct

SEQ ID NO: 391 - protein, 107 aa, Artificial Sequence
  Description of Artificial Sequence: Synthetic polypeptide
DIQMTQSPSSLSASVGDRVTITCRASPDINSYLSWYQQKPGKAPKLLIYRANTLESGVPSRFSGSGSGTDFTLTISSLQPEDFATYYCLQYDEFPYTFGQGTKIEIK

SEQ ID NO: 392 - DNA, 321 bp, Artificial Sequence
  Description of Artificial Sequence: Synthetic polynucleotide
gatatacagatgactcaaagtcctagctccttgagcgcctcagtgggagatcgggtcactataacttgtagagcctcaccagatataaactcctatctctcttggtatcagcagaagcccggcaaagcaccaaagctcttgatctatagagctaatacgctagagagcggagtgccttcacggttttctggttccgggagcggaaccgactttacccttacaatttctagcctccagccagaggacttcgcaacttactattgtctccagtatgatgaatttccttacaccttcggccaagggaccaagatcgagataaag

SEQ ID NO: 393 - protein, 119 aa, Artificial Sequence
  Description of Artificial Sequence: Synthetic polypeptide
EVQLVESGGGLVQPGGSLRLSCASSGFTFSSYAMSWVRQAPGKGLEWVAGISRGGTTSYADSVKGRFTISADTSKNTLYLQMNSLRAEDTAVYYCGRYDYDGYYAMDYWGQGTLVTVSS

SEQ ID NO: 394 - DNA, 357 bp, Artificial Sequence
  Description of Artificial Sequence: Synthetic polynucleotide
gaggtgcagctcgttgagtccggtggggggctggtgcagcctggcgggtctctccgcctctcttgtgcctcctccggctttaccttcagcagctatgctatgtcatgggtgcggcaggcaccaggcaaaggtctggaatgggtcgctgggatcagtagaggcggcacaacctcctatgccgacagcgttaaggggaggttcacaatctcggctgatacaagcaagaacactctgtatctccaaatgaacagtctccgggcagaggacaccgcggtctattactgcggccggtacgactacgacgggtactacgcaatggactattggggacagggaactctggttactgtcagctct

SEQ ID NO: 395 - protein, 107 aa, Artificial Sequence
  Description of Artificial Sequence: Synthetic polypeptide
DIQMTQSPSSLSASVGDRVTITCRASPDINSYLSWYQQKPGKAPKLLIYRANTLESGVPSRFSGSGSGTDFTLTISSLQPEDFATYYCLQYDEFPYTFGTGTKLEIK

SEQ ID NO: 396 - DNA, 321 bp, Artificial Sequence
  Description of Artificial Sequence: Synthetic polynucleotide
gatatccagatgactcaaagcccatcttctctcagcgcaagcgtgggtgaccgagtgaccatcacctgccgggcgtctcctgatatcaactcatacctgtcctggtatcagcagaagcccggaaaggcccctaagctgctgatctaccgcgcaaatacactggagagcggggtcccaagcagattcagtgggtccggcagtggtacggactttactctgaccatcagctccctgcaaccggaggactttgctacttattactgtctccagtacgacgagttcccatacactttcggaacaggcactaagctggagatcaaa

SEQ ID NO: 397 - protein, 119 aa, Artificial Sequence
  Description of Artificial Sequence: Synthetic polypeptide
EVQLVESGGGLVQPGGSLRLSCAASGFTFSSYAMSWVRQAPGKGLEWVASISRGGTTYYADSVKGRFTISRDNSKNTLYLQMNSLRAEDTAVYYCGRYDYDGYYAMDYWGQGTLVTVSS

SEQ ID NO: 398 - DNA, 357 bp, Artificial Sequence
  Description of Artificial Sequence: Synthetic polynucleotide
gaggttcaacttgtggaatccggcggcgggttagtccagcccggcgggagcttgcggctgtcctgcgccgcctctggattcacttttagctcctatgctatgtcttgggtaaggcaggcccctggtaaaggactagagtgggtggcctcgatctcccgtggtggcactacatactacgccgactccgttaaaggccggtttaccatctcccgtgacaactctaaaaatactttgtacctgcaaatgaactccctgcgggcagaagacacagccgtgtactattgcgggcgttacgattacgacggatattacgcaatggactactggggccagggcacactggtcaccgtgagcagc

SEQ ID NO: 399 - protein, 107 aa, Artificial Sequence
  Description of Artificial Sequence: Synthetic polypeptide
DIQMTQSPSSLSASVGDRVTITCKASPDINSYLNWYQQKPGKAPKLLIYRANRLVDGVPSRFSGSGSGTDFTLTISSLQPEDIATYYCLQYDEFPYTFGGGTKVEIK

SEQ ID NO: 400 - DNA, 321 bp, Artificial Sequence
  Description of Artificial Sequence: Synthetic polynucleotide
gatatacaaatgactcagtcccctagtagccttagtgctagtgtgggagacagagtgaccatcacctgcaaagcatctcctgatatcaattcctaccttaactggtatcaacagaagcctggcaaagctccaaagctcctgatttatcgcgcgaacagattggtcgatggggtcccttccagattcagcggctcagggtcagggaccgatttcaccctcacaattagttcacttcagcccgaggacatcgccacgtattattgccttcagtacgatgagttcccttacacctttggcgggggaactaaagtcgaaattaag

SEQ ID NO: 401 - protein, 119 aa, Artificial Sequence
  Description of Artificial Sequence: Synthetic polypeptide
EVQLVESGGGLVQPGGSLRLSCAASGFTFSSYAMSWVRQAPGKGLEWVASISRGGTTYYPDSVKGRFTISRDNVRNILYLQMSSLRSEDTAMYYCGRYDYDGYYAMDYWGQGTLVTVSS

SEQ ID NO: 402 - DNA, 357 bp, Artificial Sequence
  Description of Artificial Sequence: Synthetic polynucleotide
gaagtgcagcttgtggagtcaggaggagggctagttcagccaggcggctctctgagactatcttgtgctgcctccggcttcacatttagctcttatgcaatgtcctgggtccgccaggcccctggtaaaggcctggaatgggttgcttctatctctagaggcggaaccacttactaccctgattcagtgaaggggagattcacaattagtagggacaacgtgcggaacatcctctacctacagatgtcaagtttacgcagtgaggacactgcgatgtattactgcggtcgatacgattatgatggatattatgcaatggattattggggccagggcactctggtcacagtatcttcc

SEQ ID NO: 403 - protein, 107 aa, Artificial Sequence; identical to SEQ ID NO: 387
  Description of Artificial Sequence: Synthetic polypeptide

SEQ ID NO: 404 - DNA, 321 bp, Artificial Sequence
  Description of Artificial Sequence: Synthetic polynucleotide
gacatccagatgacccaatcaccatcgagtcttagtgcatccgttggggatagagtgacaatcacttgtaaggcatccccggacatcaactcatatcttaattggtatcagcaaaagccgggcaaggcccctaagctcctgatttatagggccaaccgccttgtggatggagtcccctcccgctttagtggaagcggctctggcacagactacaccctgactatcagctccttgcagcctgaggattttgctacctactactgtcttcagtacgatgaatttccatacactttcggtgctgggacaaaagtggagatcaaa

SEQ ID NO: 405 - protein, 119 aa, Artificial Sequence
  Description of Artificial Sequence: Synthetic polypeptide
EVQLVESGGGLVQPGGSLRLSCATSGFTFSSYAMSWMRKAPGKGLEYVASISRGGTTYYADSVKGRFTISVDKSKNTLYLQMNSLRAEDTAVYYCGRYDYDGYYAMDYWGQGTLVTVSS

SEQ ID NO: 406 - DNA, 357 bp, Artificial Sequence
  Description of Artificial Sequence: Synthetic polynucleotide
gaagtccagctggttgagtctggcggaggcctcgtgcagcccggtggttccttgcgactgtcatgcgctaccagcgggttcacattcagctcttatgcaatgtcctggatgcggaaggcaccgggtaagggcctggagtatgtggcctcaatctcccgaggaggcaccacatactatgccgattctgtgaaaggccgattcaccatttctgtggataagtctaaaaacactctctacctccagatgaactccctacgtgccgaagacacagccgtgtattattgcgggcgatacgattatgacggttattatgcgatggattactggggtcaaggcacactggtaacagtgtcttcc

SEQ ID NO: 407 - protein, 107 aa, Artificial Sequence; identical to SEQ ID NO: 387
  Description of Artificial Sequence: Synthetic polypeptide

SEQ ID NO: 408 - DNA, 321 bp, Artificial Sequence
  Description of Artificial Sequence: Synthetic polynucleotide
gatattcagatgacacaatcacctagctcactgtcagcgagcgtcggtgaccgggttactatcacatgcaaagcctcacccgatatcaattcataccttaactggtatcaacaaaaaccaggaaaggctccaaagctgctaatttatcgggccaatcggttggtggatggcgtcccgtcgaggtttagtggctccgggagcgggacagactacactcttacaatttcttctctccagccagaggacttcgcaacctactactgcttgcagtacgatgaatttccatataccttcggcgcagggacaaaagtggaaatcaaa

SEQ ID NO: 409 - protein, 119 aa, Artificial Sequence
  Description of Artificial Sequence: Synthetic polypeptide
EVQLVESGGGLVQPGGSLRLSCVTSGFTFSSYAMSWVRQAPGKGLEWVASISRGGTTYYSDSVKGRFTISRDNSKNTLYLQMNSLRAEDTAVYYCGRYDYDGYYAMDYWGQGTLVTVSS

SEQ ID NO: 410 - DNA, 357 bp, Artificial Sequence
  Description of Artificial Sequence: Synthetic polynucleotide
gaggtgcagcttgtagaaagcggggggggcctggtgcaacctggcgggtccctgcggcttagttgcgttacgagcggatttacattttccagttatgccatgtcttgggtgagacaagcccccggtaagggtctggagtgggtggcaagcattagccgaggcggcactacatactacagtgatagtgtgaaaggccgtttcacaatcagtagagataattctaaaaacaccctgtacttgcagatgaacagcctgcgcgccgaggatacagccgtgtactactgtggaagatacgactacgatggatattatgcgatggattactggggacagggaacccttgtcaccgtttcctct

SEQ ID NO: 411 - protein, 107 aa, Artificial Sequence
  Description of Artificial Sequence: Synthetic polypeptide
DIVLTQSPATLSLSPGERATLSCKASPDINSYMNWYQQKPGQAPRLLISRANRLVDGVPARFSGSGSGTDFTLTISSLEPEDFAVYYCLQYDEFPYTFGQGTKVEIK

SEQ ID NO: 412 - DNA, 321 bp, Artificial Sequence
  Description of Artificial Sequence: Synthetic polynucleotide
gacatagtgttgacgcagtcccctgccaccctgagcctgagccccggagagcgagcaacgttaagttgcaaggccagtccagatattaactcatacatgaattggtatcaacagaaaccaggccaggctcctagacttctcatatctcgggcaaatcgactggtggatggagtacccgcaagattcagcggcagcggcagcggaacggatttcacgctcaccatctcttcccttgagcctgaggactttgcagtctattattgcttgcagtatgatgagttcccctacacattcgggcaaggcacaaaagtggaaattaag

SEQ ID NO: 413 - protein, 119 aa, Artificial Sequence
  Description of Artificial Sequence: Synthetic polypeptide
EVQLVESGGGLVQPGGSLRLSCAASGFTFSSYAMSWVRQAPGKGLEWVASISRGGTTYYDPKFQDRATISADNSKNTAYLQMNSLRAEDTAVYYCGRYDYDGYYAMDYWGQGTLVTVSS

SEQ ID NO: 414 - DNA, 357 bp, Artificial Sequence
  Description of Artificial Sequence: Synthetic polynucleotide
gaggtgcagctggtggagagcggagggggccttgtccaaccaggaggtagcctcaggctgtcttgcgctgcctcaggatttactttttcatcctacgcaatgagctgggtgcggcaagccccagggaagggattagaatgggttgccagcatttctaggggggggacgacctactacgatccgaagtttcaggatcgcgccactatctcagccgataactccaagaatactgcctacttacagatgaacagcctgcgggccgaagacacggccgtctactattgcggccgatatgattacgacggctattacgccatggattactgggggcaagggactctggtcacagtgagctct

SEQ ID NO: 415 - protein, 107 aa, Artificial Sequence
  Description of Artificial Sequence: Synthetic polypeptide
DIQMTQSPSSLSASVGDRVTITCKASPDINSYLNWYQQKPGKAPKVLIYRANRLVDGVPSRFSGSGSGTDYTLTISSLQPEDFATYYCLQYDEFPYTFGQGTKVEIK

SEQ ID NO: 416 - DNA, 321 bp, Artificial Sequence
  Description of Artificial Sequence: Synthetic polynucleotide
gatattcagatgacccagtcgcccagcagtctctcggcctcagtgggcgaccgggtcactatcacttgcaaagcaagtcctgatataaactcctatcttaattggtatcagcagaagcccggcaaggcacctaaggttctgatatatcgcgcaaatcggctcgtggatggagtacccagccgattttccggcagcggctcaggcactgactacacactgacaatcagcagcttgcagcctgaagatttcgccacatactattgtctacagtacgacgagttcccttatacattcggccaggggaccaaggtcgagatcaag

SEQ ID NO: 417 - protein, 119 aa, Artificial Sequence
  Description of Artificial Sequence: Synthetic polypeptide
EVQLVESGGGLVQPGGSLRLSCTGSGFTFSSYAMSWLRQVPGEGLEWVSSISRGGTTDYADSVKGRFTISRDDAKKTLSLQMNSLRAEDTAVYYCGRYDYDGYYAMDYWGQGTMVTVSS

SEQ ID NO: 418 - DNA, 357 bp, Artificial Sequence
  Description of Artificial Sequence: Synthetic polynucleotide
gaggtccaactcgtggagagcggaggggggctagtgcaaccaggtggctccctccgcttgtcctgtacgggctcggggttcacattttcatcctatgccatgagctggctgagacaggtgcctggcgagggcctggaatgggtgtctagtatcagcagagggggtacaactgattacgcagattccgtcaagggacgttttaccatctcaagagacgatgccaagaagacattatcactccaaatgaactcactgagggccgaggacaccgctgtgtactattgtgggagatacgactacgacggatactatgccatggactattggggacaaggcacgatggtgacggtatctagc

SEQ ID NO: 419 - protein, 107 aa, Artificial Sequence
  Description of Artificial Sequence: Synthetic polypeptide
EIVLTQSPATLSVSPGERATLSCKASPDINSYLAWYQQKPGQAPRLLFSRANRLVDGIPARFTGSGSGTDFTLTISSLEPEDFAIYYCLQYDEFPYTFGQGTKVEIK

SEQ ID NO: 420 - DNA, 321 bp, Artificial Sequence
  Description of Artificial Sequence: Synthetic polynucleotide
gagatagtgctaacccagtctcccgcaaccctgtctgtgtcccccggagagcgcgctactctgagctgcaaagccagcccggacattaattcctaccttgcctggtatcagcagaagcctggacaggccccaagattgctcttttcacgcgccaaccgcctggtagatggtattccagctaggtttacgggctcaggcagcggaacagacttcactctcactattagctcattggagcctgaggactttgcaatttactattgtcttcagtacgacgagttcccatatactttcggccagggcacaaaagtagagatcaag

SEQ ID NO: 421 - protein, 119 aa, Artificial Sequence
  Description of Artificial Sequence: Synthetic polypeptide
EVQLVESGGGLVQPGGSLRLSCSASGFTFSSYAMSWVRQVPGKGLVWISSISRGGTTYYADSVRGRFIISRDNAKNTLYLEMNNLRGEDTAVYYCARYDYDGYYAMDYWGQGTLVTVSS

SEQ ID NO: 422 - DNA, 357 bp, Artificial Sequence
  Description of Artificial Sequence: Synthetic polynucleotide
gaggttcaactcgtggagtctggaggcgggctagtgcagcctggcggctccctgcgactgtcttgcagcgcatcaggctttacattcagttcttatgccatgagctgggtgaggcaggtgcccggcaagggtctggtgtggatcagctcaatctccaggggcgggactacatattacgccgattcggtcaggggtcgttttatcattagcagggataatgccaagaacaccttgtatttggagatgaacaacctaagaggcgaagacaccgctgtgtactattgtgcccgttacgactacgatgggtactacgccatggactattggggccagggaaccttggtgactgtgtcaagt

SEQ ID NO: 423 - protein, 107 aa, Artificial Sequence
  Description of Artificial Sequence: Synthetic polypeptide
DIQLTQSPDSLAVSLGERATINCKASPDINSYLSWYQQRPGQPPRLLIHRANRLVDGVPDRFSGSGFGTDFTLTITSLQAEDVAIYYCLQYDEFPYTFGQGTKLEIK

SEQ ID NO: 424 - DNA, 321 bp, Artificial Sequence
  Description of Artificial Sequence: Synthetic polynucleotide
gacatacagttgactcagtcaccggattcgctggcagtttcgctgggtgagagagcaaccatcaactgcaaagcatctcccgatatcaactcttatctgtcttggtatcagcagcgtccgggacaaccccctaggctgcttattcaccgagccaacaggctggtggacggggtgccagaccgcttctcgggatcaggatttggaaccgattttaccctaacaattactagtctccaagcggaagacgtggcgatctattattgtctacaatatgacgagttcccctacaccttcggccagggcacgaagttggagatcaag

SEQ ID NO: 425 - protein, 119 aa, Artificial Sequence
  Description of Artificial Sequence: Synthetic polypeptide
EVQLVESGGGLVQPGGSLRLSCAASGFTFSSYAMSWVRQAPGKGLEWVASISRGGTTYYADSVKGRFTISADTSKNTAYLQMNSLRAEDTAVYYCARYDYDGYYAMDYWGQGTLVTVSS

SEQ ID NO: 426 - DNA, 357 bp, Artificial Sequence
  Description of Artificial Sequence: Synthetic polynucleotide
gaggtccagctcgtcgaatccggtggagggctagttcagccaggcggctcattgcgtttgtcttgtgccgcctccggtttcacattctcttcttacgctatgtcctgggtccgacaagccccaggaaaaggcttggaatgggtggccagtatcagtagaggtgggactacatattatgccgactccgtgaagggcagattcaccatctcagctgacaccagtaagaacactgcctacctacagatgaacagccttcgggccgaggacaccgctgtgtattactgtgcccggtacgattatgatggatattatgctatggactattggggtcaggggaccttggtgaccgtctctagc

SEQ ID NO: 427 - protein, 107 aa, Artificial Sequence
  Description of Artificial Sequence: Synthetic polypeptide
DIQMTQSPSSLSASVGDRVTITCKASPDINSYLSWYQQKPGKAPKLLIYRANRLVDGVPSRFSGSGSGTDFTLTISSLQPEDFATYYCLQYDEFPYTFGQGTKVEIK

SEQ ID NO: 428 - DNA, 321 bp, Artificial Sequence
  Description of Artificial Sequence: Synthetic polynucleotide
gacattcagatgactcaatcgccgagttctcttagcgcttctgttggggaccgggtgacaatcacatgcaaggcctctcccgatataaactcctatctaagctggtatcagcagaagccagggaaggcccccaagttgttaatctatcgcgccaacagactggtggatggggtgccctctcgattctccgggagtggcagtgggactgattttacactgaccatttcctcattgcagcccgaagacttcgctacctattactgcttgcagtacgatgagttcccatatacattcggtcaggggactaaagtggagataaaa

SEQ ID NO: 429 - protein, 119 aa, Artificial Sequence
  Description of Artificial Sequence: Synthetic polypeptide
EVQLLESGGGLVQPGGSLRLSCAASGFTFSSYAMSWVRQAPGKGLEWVSSISRGGTTYYADSVKGRFTISRDNSKNTLYLQMNSLRAEDTAVYYCARYDYDGYYAMDYWGQGTLVTVSS

SEQ ID NO: 430 - DNA, 357 bp, Artificial Sequence
  Description of Artificial Sequence: Synthetic polynucleotide
gaggtacagctgctggaatctggtggggggctggtccagccaggggggtcactacgactgagctgcgctgcctccggttttacattcagcagctatgcaatgtcatgggtcagacaggcaccaggtaaaggcctcgaatgggtatcctccatctcacgtggtgggaccacttactatgccgatagtgtgaagggcaggttcacgatctcaagagataattcaaagaatacactctatctacaaatgaacagtttaagggccgaggacaccgctgtttactattgtgccagatatgactacgacggttattatgctatggattactggggacaaggaacgctggtaactgttagctct

SEQ ID NO: 431 - protein, 107 aa, Artificial Sequence
  Description of Artificial Sequence: Synthetic polypeptide
DIQMTQSPSSLSASVGDRVTITCKASPDINSYLSWYQQKPGEAPKLLIYRANRLVDGVPSRFSGSGSGTDFTLTISSLQPEDFATYYCLQYDEFPYTFGQGTKVEIK

SEQ ID NO: 432 - DNA, 321 bp, Artificial Sequence
  Description of Artificial Sequence: Synthetic polynucleotide
gacatccaaatgacccagtcgccttcctccttgtctgcatctgtcggagatcgggtgacgatcacttgcaaagcgagtccagacatcaactcatatctgtcctggtatcagcagaagccgggagaggcacctaagctcctgatctacagagcaaacagattagtggatggtgtgccctcacggttttctggctccgggtccggcaccgatttcaccttgaccatctcatccctacagcccgaggatttcgctacttactattgcttacagtatgatgagtttccatacaccttcggtcaaggcaccaaggttgagattaag

SEQ ID NO: 433 - protein, 119 aa, Artificial Sequence
  Description of Artificial Sequence: Synthetic polypeptide
EVQLLETGGGLVKPGGSLRLSCAASGFTFSSYAMSWIRQAPGKGLEWVASISRGGTTYYGDSVKGRFTISRDHAKNSLYLQMNSLRVEDTAVYYCVRYDYDGYYAMDYWGLGTLVTVSS

SEQ ID NO: 434 - DNA, 357 bp, Artificial Sequence
  Description of Artificial Sequence: Synthetic polynucleotide
gaagttcaactgcttgagaccggaggcggcctggtaaaacctgggggctcactgaggctgagttgtgccgcttctgggttcaccttttcatcctatgcgatgtcatggatacggcaggctcctgggaaggggcttgagtgggttgcatcaatttcacgaggtgggacaacttattatggggattccgttaaaggtagatttacgatctctagagaccatgccaaaaattctctctatctccagatgaatagtcttagggtggaggacaccgctgtgtactactgtgtccggtacgactatgatgggtactatgctatggactattgggggctcggcactctggtcactgttagctct

SEQ ID NO: 435 - protein, 107 aa, Artificial Sequence
  Description of Artificial Sequence: Synthetic polypeptide
AIRMTQSPSFLSASVGDRVTITCKASPDINSYLSWYQQRPGKAPKLLIYRANRLVDGVPSRFSGGGSGTDFTLTISSLQPEDIATYYCLQYDEFPYTFGQGTKLEIK

SEQ ID NO: 436 - DNA, 321 bp, Artificial Sequence
  Description of Artificial Sequence: Synthetic polynucleotide
gccatccgcatgacacaatctccctccttcctttctgccagtgtcggggacagagtgactatcacatgcaaagccagcccagatattaattcgtacctgtcttggtatcagcagaggcccggcaaggcaccaaagctgttgatatatcgggccaaccgcttagtggacggtgtcccctctcgattcagcggaggcggtagcgggacggactttacactgaccatctccagtctccaacccgaggatattgccacttactattgtcttcagtatgacgagttcccctacacatttggacagggcaccaagctagaaattaag

SEQ ID NO: 437 - protein, 119 aa, Artificial Sequence
  Description of Artificial Sequence: Synthetic polypeptide
EVQLVESGGGLVQPGGSLRLSCAASGFTFSSYAMSWVRQAPGKGLEWVASISRGGTTYYAESLEGRFTISRDDSKNSLYLQMNSLKTEDTAVYYCARYDYDGYYAMDYWGQGTLVTVSS

SEQ ID NO: 438 - DNA, 357 bp, Artificial Sequence
  Description of Artificial Sequence: Synthetic polynucleotide
gaggttcagctggtggagtctggtggggggctcgtacagccgggtggctccctaaggctgagttgcgctgcctcaggctttaccttctcaagctacgcgatgtcctgggtgagacaggcccctggcaaaggactggagtgggtggcaagcattagccggggcggaactacctattacgctgagtcgttagaggggcggtttactatctccagagacgattcaaagaactcgttatacttgcagatgaacagcctcaagaccgaggacaccgccgtgtactactgcgcccggtacgactatgacgggtactatgctatggattattggggacaaggcaccctcgtgaccgtctctagc

SEQ ID NO: 439 - protein, 107 aa, Artificial Sequence
  Description of Artificial Sequence: Synthetic polypeptide
DIQMTQSPSSLSASVGDRVTITCKASPDINSYLSWYQQKPGKAPKTLIYRANRLVDGVPSRFSGSGSGTDFTLTISSLQPEDFATYYCLQYDEFPYTFGQGTKLEIK

SEQ ID NO: 440 - DNA, 321 bp, Artificial Sequence
  Description of Artificial Sequence: Synthetic polynucleotide
gacatccagatgacacagtccccttcttcactttccgcttctgtgggcgacagggtgacgatcacgtgtaaggcctcgccagacattaattcgtacttatcgtggtatcagcagaaaccgggtaaagctccgaagactctgatctatagagcaaataggctcgtagacggtgtcccatctagatttagtgggagcggcagcggaaccgacttcactctcaccatctcatccctgcaaccggaggatttcgctacttactattgcttgcagtatgacgagtttccatatacgtttggtcagggaaccaaattagagatcaaa

SEQ ID NO: 441 - protein, 119 aa, Artificial Sequence
  Description of Artificial Sequence: Synthetic polypeptide
QVTLRESGPALVKPTQTLTLTCAASGFTFSSYAMSWIRQPPGKALEWLASISRGGTTYYNPSLKDRLTISKDTSANQVVLKVTNMDPADTATYYCARYDYDGYYAMDYWGQGTTVTVSS

SEQ ID NO: 442 - DNA, 357 bp, Artificial Sequence
  Description of Artificial Sequence: Synthetic polynucleotide
caggtaacactccgagagagtgggccagctctcgtgaagcccacgcagactttaacactaacgtgtgcggcaagcggctttacattttcgagctacgcgatgagctggataaggcaacctcctgggaaggcgttggagtggttggcctcaattagccggggtggcaccacttactacaatcctagtcttaaggacagacttactatttcaaaagatacgtccgccaaccaggtggtactgaaggtcacaaatatggacccagctgacactgctacttactactgcgcccggtacgattacgatggttactacgctatggattactggggtcaaggaaccacagtgaccgtcagttca

SEQ ID NO: 443 - protein, 107 aa, Artificial Sequence
  Description of Artificial Sequence: Synthetic polypeptide
DIQMTQSPSTLSASVGDRVTITCKASPDINSYLSWYQQKPGKAPKLLIYRANRLVDGVPSRFSGSGSGTAFTLTISSLQPDDFATYYCLQYDEFPYTFGGGTKVEIK

SEQ ID NO: 444 - DNA, 321 bp, Artificial Sequence
  Description of Artificial Sequence: Synthetic polynucleotide
gatatccagatgacgcagtccccttcaaccctcagtgccagcgttggtgaccgggttactatcacctgtaaggctagtcccgatataaattcctatttgtcttggtatcagcagaagccaggcaaggctcctaagctgctcatctaccgggctaacaggttagttgacggtgtgccctcccgattttccggcagtggcagcgggaccgctttcactcttacaatctcatctcttcaaccggacgacttcgctacgtactactgcctccaatatgatgagtttccatacacattcggaggaggcacaaaagtcgaaatcaag

SEQ ID NO: 445 - protein, 119 aa, Artificial Sequence
  Description of Artificial Sequence: Synthetic polypeptide
EVQLVESGGGLVQPGGSLRLSCAASGFTFSSYAMSWVRQAPGKGLEWVSAISRGGTTYYADSVKGRFTISADTSKETAYLQMNSLRAEDTAVYYCGRYDYDGYYAMDYWGQGTLVTVSS

SEQ ID NO: 446 - DNA, 357 bp, Artificial Sequence
  Description of Artificial Sequence: Synthetic polynucleotide
gaagtccagctggtggagtccggcggaggcttggttcagcccggaggatctttgcgactgtcttgcgccgccagcggtttcactttcagcagctatgccatgagttgggttagacaagctcccggcaaggggctggaatgggttagtgctattagccggggagggacaacatattacgctgactctgtcaaaggccgattcaccatctctgctgacacgagcaaagaaaccgcctacctccaaatgaacagcctgcgagctgaggacactgccgtctactattgtggtcgatatgattatgatgggtactatgcaatggactattgggggcagggcacactggtgaccgtgagctct

SEQ ID NO: 447 - protein, 107 aa, Artificial Sequence; identical to SEQ ID NO: 351
  Description of Artificial Sequence: Synthetic polypeptide

SEQ ID NO: 448 - DNA, 321 bp, Artificial Sequence
  Description of Artificial Sequence: Synthetic polynucleotide
gatattcagatgacgcagagtccctcctccctatctgcctctgttggagatcgagtcaccattacgtgtaaagcgtctcccgatatcaacagctacctctcttggtatcagcagaaaccagggaaggcccccaagctgctgatctatagagctaatcgcttagtggatggagtgccaagcaggttctccgggtccggcagtggaaccgatttcaccttgacaataagtagcttgcaacctgaggatattgcaacatactactgtctacagtacgacgagttcccctacaccttcggccaagggacaaagctggagattaag

SEQ ID NO: 449 - protein, 119 aa, Artificial Sequence; identical to SEQ ID NO: 345
  Description of Artificial Sequence: Synthetic polypeptide

SEQ ID NO: 450 - DNA, 357 bp, Artificial Sequence
  Description of Artificial Sequence: Synthetic polynucleotide
gaagtgcagctcgtggagagcggcggcggtctggtacagccaggggggtcactgcgtctctcatgtgctgcgagtggctttacgttctcttcctacgctatgtcctgggtcaggcaggcaccggggaagggcttagagtgggttagtgcaatctctaggggcggtacaacctactatgccgactctgtcaagggcaggtttacaatttcaagagataattctaagaatactctttacctacagatgaatagcttgcgggcggaagacacagcagtctattattgtggccgctatgactacgacggatactatgccatggactactggggccaaggcactttggtcacggtgagctct

SEQ ID NO: 451 - protein, 107 aa, Artificial Sequence; identical to SEQ ID NO: 351
  Description of Artificial Sequence: Synthetic polypeptide

SEQ ID NO: 452 - DNA, 321 bp, Artificial Sequence
  Description of Artificial Sequence: Synthetic polynucleotide
gacatccagatgacccagagccctagttcattgtctgccagtgtgggggatagggtcactatcacgtgtaaggcttcccctgacatcaattcatacctgtcatggtatcagcagaagcctggaaaagcccctaaactgctgatctaccgcgcgaataggcttgtggacggcgttccaagccgcttctctggctctggatcagggaccgacttcaccctcacgatctccagcctccaacccgaggatatcgccacctattattgccttcagtacgatgagttcccctatacattcggccaggggacaaagctggaaatcaaa

SEQ ID NO: 453 - protein, 119 aa, Artificial Sequence; identical to SEQ ID NO: 445
  Description of Artificial Sequence: Synthetic polypeptide

SEQ ID NO: 454 - DNA, 357 bp, Artificial Sequence
  Description of Artificial Sequence: Synthetic polynucleotide
gaggtccagctcgtcgagtcgggtgggggcttggtgcaacccggtggcagtttgcgcctgagctgcgccgcgagcgggttcactttcagttcgtatgccatgagttgggtgcgacaagcgcccggcaaaggactggagtgggtgtcagccattagccggggcggtactacctactatgcggactcggtcaagggaagattcaccatcagcgctgataccagtaaggaaaccgcttatcttcagatgaactccctgcgtgccgaggatacagcagtctactattgcgggcgctacgattatgacggatattatgccatggattactgggggcagggcactctggtcacagtcagctct

SEQ ID NO: 455 - protein, 107 aa, Artificial Sequence; identical to SEQ ID NO: 347
  Description of Artificial Sequence: Synthetic polypeptide

SEQ ID NO: 456 - DNA, 321 bp, Artificial Sequence
  Description of Artificial Sequence: Synthetic polynucleotide
gatattcagatgacgcagtctccctcttccctgagcgcctccgtcggcgatagagttacgatcacctgtcaggccagcccagatatcaactcctatctgaattggtatcagcaaaagcctgggaaggctcccaagttgctgatctacagagccaataacttagagactggcgtgccgtctcggttcagcgggtccggcagtggaaccgactttacactgaccatttccagcctccaacctgaggatatcgccacatattattgtctccagtatgacgagttcccttacacatttggtcaaggaactaaactggaaatcaaa

SEQ ID NO: 457 - protein, 119 aa, Artificial Sequence; identical to SEQ ID NO: 445
  Description of Artificial Sequence: Synthetic polypeptide

SEQ ID NO: 458 - DNA, 357 bp, Artificial Sequence
  Description of Artificial Sequence: Synthetic polynucleotide
gaggtgcagctggtcgaaagtggaggcggactcgtgcagcccggcggtagtctgcgattgagctgtgccgcgtccggctttactttctcatcttacgctatgagttgggtccgccaggccccaggcaaaggactggagtgggtatcagccatcagtagggggggaactacctattacgcagattctgtgaagggacgcttcaccatcagcgcggacactagcaaggagactgcctacctgcaaatgaatagtctgagagccgaggataccgccgtgtactattgtggcaggtatgactacgatggctattatgctatggattactggggccaggggacgttagtgacagtaagctct

SEQ ID NO: 459 - protein, 107 aa, Artificial Sequence; identical to SEQ ID NO: 359
  Description of Artificial Sequence: Synthetic polypeptide

SEQ ID NO: 460 - DNA, 321 bp, Artificial Sequence
  Description of Artificial Sequence: Synthetic polynucleotide
gatattcagatgacccaatccccttcttctctgagcgcttctgtgggcgatagagttacaataacctgtcgggcgtccccagacattaactcttatgtagcatggtatcagcaaaagcctggaaaggcaccaaagttactgatctaccgggccaattttctggagtcgggcgtgccctcacgatttagcggtagcagatcaggcacagactttactctgaccattagctctctgcaacccgaggacttcgccacctactactgtttgcagtatgacgagtttccatacacttttggtcaaggaaccaaagtcgaaatcaaa

SEQ ID NO: 461 - protein, 119 aa, Artificial Sequence
  Description of Artificial Sequence: Synthetic polypeptide
QIQLVQSGAEVKKPGASVKVSCAASGFTFSSYAMSWVRQAPGKSFKWMGSISRGGTTYYSADFKGRFAITKDTSASTAYMELSSLRSEDTAVYYCARYDYDGYYAMDYWGQGTLVTVSS

SEQ ID NO: 462 - DNA, 357 bp, Artificial Sequence
  Description of Artificial Sequence: Synthetic polynucleotide
cagatacagctggtgcagtctggtgccgaggttaaaaagcccggagcctcggttaaagtgagttgtgcggcaagcggattcacgttcagttcctacgctatgtcctgggtgcggcaggctcctggcaagtcatttaagtggatggggtcgatctcacggggtggaaccacctattactctgccgacttcaaggggagatttgcgattacaaaagatacaagcgcctctacggcctacatggagttaagtagccttagaagcgaagacacggcggtgtactactgcgccagatatgactatgacggctactacgccatggactactggggccagggcacactggttacagtcagctct

SEQ ID NO: 463 - protein, 107 aa, Artificial Sequence
  Description of Artificial Sequence: Synthetic polypeptide
DIVMTQSPDSLAVSLGERATISCKASPDINSYLSWYQQKPGQPPKLLIYRANRLVDGVPDRFSGSGSRTDFTLTISSLQAEDVAVYYCLQYDEFPYTFGQGTKVEIK

SEQ ID NO: 464 - DNA, 321 bp, Artificial Sequence
  Description of Artificial Sequence: Synthetic polynucleotide
gatatcgtgatgacacaaagcccagacagtctggcagtgtccctcggcgagcgcgctaccatctcatgcaaagctagtcccgacatcaattcctatctgtcctggtatcagcaaaaaccaggccaaccccccaagctgcttatctatcgggctaaccgattagtcgatggggtgccagatagattttcaggctctggttcccggacagattttactctcacgatctcctcactacaggcagaagatgttgcagtgtattactgcctgcaatacgacgagttcccctacaccttcggccaaggcacgaaagtggagatcaag

SEQ ID NO: 465 - protein, 241 aa, Artificial Sequence
  Description of Artificial Sequence: Synthetic polypeptide
EVQLVESGGGLVQPGGSLRLSCAASGFTFSSYAMSWVRQAPGKGLEWVSSISRGGTTYYPDSVKGRFTISRDNSKNTLYLQMNSLRAEDTAVYYCGRYDYDGYYAMDYWGQGTLVTVSSGGGGSGGGGSGGGGSDIQMTQSPSSLSASVGDRVTITCKASPDINSYLNWYQQKPGKAPKLLIYRANRLVDGVPSRFSGSGSGTDYTLTISSLQPEDFATYYCLQYDEFPYTFGAGTKVEIK

SEQ ID NO: 466 - DNA, 723 bp, Artificial Sequence
  Description of Artificial Sequence: Synthetic polynucleotide
gaagtgcaactggtcgagtctgggggcggccttgtgcaacctggaggcagccttcgactcagttgcgccgcgtctggttttaccttctcctcttacgcgatgagctgggttcgccaggcccccggcaagggacttgagtgggttagttcgatctcccgcggaggcaccacatattatcctgactcggttaagggacgcttcactatctctagggacaattcaaagaacacactgtatctccaaatgaactccttgcgggccgaggacactgctgtgtattattgcggacgatacgactacgatgggtattacgccatggattactgggggcaaggtacactggtcactgtgagttcggggggcggcggaagtggtggagggggaagtggtggaggaggaagcgatatacagatgacacagagcccttcaagtttatctgcaagcgtcggcgatcgtgttacaataacttgcaaggcatctcccgacatcaattcctacctcaactggtatcagcagaagcctgggaaggctcctaagctgcttatttacagagcaaatcgcctggtggacggcgtgcccagtcggttttccgggtctgggagcggaacggattacacactgaccatctcaagcctgcaacccgaagacttcgctacatattactgccttcagtatgatgagttcccatataccttcggcgctgggaccaaggtggagataaag

SEQ ID NO: 467 - protein, 47 aa, Artificial Sequence
  Description of Artificial Sequence: Synthetic polypeptide
KPTTTPAPRPPTPAPTIASQPLSLRPEACRPAAGGAVHTRGLDFACD

SEQ ID NO: 468 - DNA, 141 bp, Artificial Sequence
  Description of Artificial Sequence: Synthetic polynucleotide
aagcccaccaccacccctgcccctagacctccaaccccagcccctacaatcgccagccagcccctgagcctgaggcccgaagcctgtagacctgccgctggcggagccgtgcacaccagaggcctggatttcgcctgcgac

SEQ ID NO: 469 - protein, 47 aa, Artificial Sequence
  Description of Artificial Sequence: Synthetic polypeptide
KPTTTPAPRPPTPAPTIASQPLSLRPEASRPAAGGAVHTRGLDFASD

SEQ ID NO: 470 - DNA, 141 bp, Artificial Sequence
  Description of Artificial Sequence: Synthetic polynucleotide
aagcctaccaccacccccgcacctcgtcctccaacccctgcacctacgattgccagtcagcctctttcactgcggcctgaggccagcagaccagctgccggcggtgccgtccatacaagaggactggacttcgcgtccgat

SEQ ID NO: 471 - DNA, 141 bp, Artificial Sequence
  Description of Artificial Sequence: Synthetic polynucleotide
aaacctactaccactccagccccaaggcccccaaccccagcaccgactatcgcatcacagcctttgtcactgcgtcctgaagccagccggccagctgcagggggggccgtccacacaaggggactcgactttgcgagtgat

SEQ ID NO: 472 - DNA, 141 bp, Artificial Sequence
  Description of Artificial Sequence: Synthetic polynucleotide
aaacctactacaactcctgccccccggcctcctacaccagctcctactatcgcctcccagccactcagtctcagacccgaggcttctaggccagcggccggaggcgcggtccacacccgcgggctggactttgcatccgat

SEQ ID NO: 473 - protein, 141 aa, Artificial Sequence
  Description of Artificial Sequence: Synthetic polypeptide
KPTTTPAPRPPTPAPTIASQPLSLRPEASRPAAGGAVHTRGLDFASDKPTTTPAPRPPTPAPTIASQPLSLRPEASRPAAGGAVHTRGLDFASDKPTTTPAPRPPTPAPTIASQPLSLRPEACRPAAGGAVHTRGLDFACD

SEQ ID NO: 474 - DNA, 423 bp, Artificial Sequence
  Description of Artificial Sequence: Synthetic polynucleotide
aagcctaccaccacccccgcacctcgtcctccaacccctgcacctacgattgccagtcagcctctttcactgcggcctgaggccagcagaccagctgccggcggtgccgtccatacaagaggactggacttcgcgtccgataaacctactaccactccagccccaaggcccccaaccccagcaccgactatcgcatcacagcctttgtcactgcgtcctgaagccagccggccagctgcagggggggccgtccacacaaggggactcgactttgcgagtgataagcccaccaccacccctgcccctagacctccaaccccagcccctacaatcgccagccagcccctgagcctgaggcccgaagcctgtagacctgccgctggcggagccgtgcacaccagaggcctggatttcgcctgcgac

SEQ ID NO: 475 - protein, 28 aa, Artificial Sequence
  Description of Artificial Sequence: Synthetic peptide
IYIWAPLAGTCGVLLLSLVITLYCNHRN

SEQ ID NO: 476 - DNA, 84 bp, Artificial Sequence
  Description of Artificial Sequence: Synthetic oligonucleotide
atctacatctgggcccctctggccggcacctgtggcgtgctgctgctgagcctggtcatcaccctgtactgcaaccaccggaat

SEQ ID NO: 477 - protein, 32 aa, Artificial Sequence
  Description of Artificial Sequence: Synthetic polypeptide
FWVLVVVGGVLACYSLLVTVAFIIFWVRSKRS

SEQ ID NO: 478 - DNA, 96 bp, Artificial Sequence
  Description of Artificial Sequence: Synthetic oligonucleotide
ttttgggtgctggtggtggttggtggagtcctggcttgctatagcttgctagtaacagtggcctttattattttctgggtgaggagtaagaggagc

SEQ ID NO: 479 - protein, 112 aa, Artificial Sequence
  Description of Artificial Sequence: Synthetic polypeptide
RVKFSRSADAPAYQQGQNQLYNELNLGRREEYDVLDKRRGRDPEMGGKPRRKNPQEGLYNELQKDKMAEAYSEIGMKGERRRGKGHDGLYQGLSTATKDTYDALHMQALPPR

SEQ ID NO: 480 - DNA, 336 bp, Artificial Sequence
  Description of Artificial Sequence: Synthetic polynucleotide
cgggtgaagttcagccggagcgccgacgcccctgcctaccagcagggccagaaccagctgtacaacgagctgaacctgggccggagggaggagtacgacgtgctggacaagcggagaggccgggaccctgagatgggcggcaagccccggagaaagaaccctcaggagggcctgtataacgaactgcagaaagacaagatggccgaggcctacagcgagatcggcatgaagggcgagcggcggaggggcaagggccacgacggcctgtaccagggcctgagcaccgccaccaaggatacctacgacgccctgcacatgcaggccctgccccccaga

SEQ ID NO: 481 - protein, 41 aa, Artificial Sequence
  Description of Artificial Sequence: Synthetic polypeptide
RSKRSRGGHSDYMNMTPRRPGPTRKHYQPYAPPRDFAAYRS

SEQ ID NO: 482 - DNA, 123 bp, Artificial Sequence
  Description of Artificial Sequence: Synthetic polynucleotide
aggagcaagcggagcagaggcggccacagcgactacatgaacatgaccccccggaggcctggccccacccggaagcactaccagccctacgcccctcccagggacttcgccgcctaccggagc

SEQ ID NO: 483 - protein, 42 aa, Artificial Sequence
  Description of Artificial Sequence: Synthetic polypeptide
KRGRKKLLYIFKQPFMRPVQTTQEEDGCSCRFPEEEEGGCEL

SEQ ID NO: 484 - DNA, 126 bp, Artificial Sequence
  Description of Artificial Sequence: Synthetic polynucleotide
aagagaggccggaagaaactgctgtacatcttcaagcagcccttcatgcggcccgtgcagaccacccaggaagaggacggctgcagctgccggttccccgaggaagaggaaggcggctgcgaactg

SEQ ID NO: 485 - protein, 24 aa, Artificial Sequence
  Description of Artificial Sequence: Synthetic peptide
LCARPRRSPAQEDGKVYINMPGRG

SEQ ID NO: 486 - DNA, 72 bp, Artificial Sequence
  Description of Artificial Sequence: Synthetic oligonucleotide
ctgtgcgcacgcccacgccgcagccccgcccaagaagatggcaaagtctacatcaacatgccaggcaggggc

SEQ ID NO: 487 - protein, 52 aa, Artificial Sequence
  Description of Artificial Sequence: Synthetic polypeptide
YFLGRLVPRGRGAAEAATRKQRITETESPYQELQGQRSDVYSDLNTQRPYYK

SEQ ID NO: 488 - DNA, 156 bp, Artificial Sequence
  Description of Artificial Sequence: Synthetic polynucleotide
tacttcctgggccggctggtccctcgggggcgaggggctgcggaggcagcgacccggaaacagcgtatcactgagaccgagtcgccttatcaggagctccagggtcagaggtcggatgtctacagcgacctcaacacacagaggccgtattacaaa

SEQ ID NO: 489 - protein, 22 aa, Artificial Sequence
  Description of Artificial Sequence: Synthetic peptide
MLLLVTSLLLCELPHPAFLLIP

SEQ ID NO: 490 - DNA, 66 bp, Artificial Sequence
  Description of Artificial Sequence: Synthetic oligonucleotide
atgctgctgctggtgaccagcctgctgctgtgtgagctgccccaccccgcctttctgctgatcccc

SEQ ID NO: 491 - protein, 20 aa, Artificial Sequence
  Description of Artificial Sequence: Synthetic peptide
MRLPAQLLGLLMLWVPGSSG

SEQ ID NO: 492 - DNA, 60 bp, Artificial Sequence
  Description of Artificial Sequence: Synthetic oligonucleotide
atgaggctccctgctcagctcctggggctgctaatgctctgggtcccaggatccagtggg

SEQ ID NO: 493 - protein, 18 aa, Artificial Sequence
  Description of Artificial Sequence: Synthetic peptide
MDWTWILFLVAAATRVHS

SEQ ID NO: 494 - DNA, 54 bp, Artificial Sequence
  Description of Artificial Sequence: Synthetic oligonucleotide
atggattggacctggattctgtttctggtggccgctgccacaagagtgcacagc

SEQ ID NO: 495 - protein, 21 aa, Artificial Sequence
  Description of Artificial Sequence: Synthetic peptide
MALPVTALLLPLALLLHAARP

SEQ ID NO: 496 - DNA, 63 bp, Artificial Sequence
  Description of Artificial Sequence: Synthetic oligonucleotide
atggcgctgcccgtgaccgccttgctcctgccgctggccttgctgctccacgccgccaggccg

SEQ ID NO: 497 - protein, 19 aa, Artificial Sequence
  Description of Artificial Sequence: Synthetic peptide
MGWSCIILFLVATATGVHS

SEQ ID NO: 498 - DNA, 57 bp, Artificial Sequence
  Description of Artificial Sequence: Synthetic oligonucleotide
atgggctggtcctgcatcatcctgtttctggtggctaccgccaccggcgtgcacagc

SEQ ID NO: 499 - protein, 20 aa, Artificial Sequence
  Description of Artificial Sequence: Synthetic peptide
MSRSVALAVLALLSLSGLEA

SEQ ID NO: 500 - DNA, 60 bp, Artificial Sequence
  Description of Artificial Sequence: Synthetic oligonucleotide
atgtctcgctccgtggccttagctgtgctcgcgctactctctctttctggcctggaggct

SEQ ID NO: 501 - protein, 19 aa, Artificial Sequence
  Description of Artificial Sequence: Synthetic peptide
MTRLTVLALLAGLLASSRA

SEQ ID NO: 502 - DNA, 57 bp, Artificial Sequence
  Description of Artificial Sequence: Synthetic oligonucleotide
atgacccggctgacagtcctggccctgctggctggtctgctggcgtcctcgagggcc

SEQ ID NO: 503 - protein, 18 aa, Artificial Sequence
  Description of Artificial Sequence: Synthetic peptide
MKWVTFISLLFLFSSAYS

SEQ ID NO: 504 - DNA, 54 bp, Artificial Sequence
  Description of Artificial Sequence: Synthetic oligonucleotide
atgaagtgggtaacctttatttcccttctttttctctttagctcggcttattcc

SEQ ID NO: 505 - protein, 23 aa, Artificial Sequence
  Description of Artificial Sequence: Synthetic peptide
MGKNKLLHPSLVLLLLVLLPTDA

SEQ ID NO: 506 - DNA, 69 bp, Artificial Sequence
  Description of Artificial Sequence: Synthetic oligonucleotide
atggggaagaacaaactccttcatccaagtctggttcttctcctcttggtcctcctgcccacagacgcc

SEQ ID NO: 507 - protein, 19 aa, Artificial Sequence
  Description of Artificial Sequence: Synthetic peptide
MEFGLSWLFLVAILKGVQC

SEQ ID NO: 508 - DNA, 57 bp, Artificial Sequence
  Description of Artificial Sequence: Synthetic oligonucleotide
atggagtttgggctgagctggctttttcttgtggctattttaaaaggtgtccagtgt

SEQ ID NO: 509 - protein, 22 aa, Artificial Sequence
  Description of Artificial Sequence: Synthetic peptide
MDMRVPAQLLGLLLLWLSGARC

SEQ ID NO: 510 - DNA, 66 bp, Artificial Sequence
  Description of Artificial Sequence: Synthetic oligonucleotide
atggacatgagggtccctgctcagctcctggggctcctgctgctctggctctcaggtgccagatgt

SEQ ID NO: 511 - protein, 19 aa, Artificial Sequence
  Description of Artificial Sequence: Synthetic peptide
MEFGLSWVFLVALFRGVQC

SEQ ID NO: 512 - DNA, 57 bp, Artificial Sequence
  Description of Artificial Sequence: Synthetic oligonucleotide
atggagtttgggctgagctgggttttcctcgttgctctttttagaggtgtccagtgt

SEQ ID NO: 513 - protein, 21 aa, Artificial Sequence
  Description of Artificial Sequence: Synthetic peptide
MGTSLLCWMALCLLGADHADA

SEQ ID NO: 514 - DNA, 63 bp, Artificial Sequence
  Description of Artificial Sequence: Synthetic oligonucleotide
atgggcaccagcctcctctgctggatggccctgtgtctcctgggggcagatcacgcagatgct

SEQ ID NO: 515 - protein, 24 aa, Artificial Sequence
  Description of Artificial Sequence: Synthetic peptide
MKRFLFLLLTISLLVMVQIQTGLS

SEQ ID NO: 516 - DNA, 72 bp, Artificial Sequence
  Description of Artificial Sequence: Synthetic oligonucleotide
atgaagcgcttcctcttcctcctactcaccatcagcctcctggttatggtacagatacaaactggactctca

SEQ ID NO: 517 - protein, 28 aa, Artificial Sequence
  Description of Artificial Sequence: Synthetic peptide
MGAGATGRAMDGPRLLLLLLLGVSLGGA

SEQ ID NO: 518 - DNA, 84 bp, Artificial Sequence
  Description of Artificial Sequence: Synthetic oligonucleotide
atgggggcaggtgccaccggccgcgccatggacgggccgcgcctgctgctgttgctgcttctgggggtgtcccttggaggtgcc

SEQ ID NO: 519 - protein, 114 aa, Artificial Sequence
  Description of Artificial Sequence: Synthetic polypeptide
NWVNVISDLKKIEDLIQSMHIDATLYTESDVHPSCKVTAMKCFLLELQVISLESGDASIHDTVENLIILANNSLSSNGNVTESGCKECEELEEKNIKEFLQSFVHIVQMFINTS

SEQ ID NO: 520 - DNA, 342 bp, Artificial Sequence
  Description of Artificial Sequence: Synthetic polynucleotide
aactgggtgaatgtgatcagcgacctgaagaagatcgaggatctgatccagagcatgcacattgatgccaccctgtacacagaatctgatgtgcaccctagctgtaaagtgaccgccatgaagtgttttctgctggagctgcaggtgatttctctggaaagcggagatgcctctatccacgacacagtggagaatctgatcatcctggccaacaatagcctgagcagcaatggcaatgtgacagagtctggctgtaaggagtgtgaggagctggaggagaagaacatcaaggagtttctgcagagctttgtgcacatcgtgcagatgttcatcaatacaagc

SEQ ID NO: 521 - protein, 237 aa, Artificial Sequence
  Description of Artificial Sequence: Synthetic polypeptide
ITCPPPMSVEHADIWVKSYSLYSRERYICNSGFKRKAGTSSLTECVLNKATNVAHWTTPSLKCIRDPALVHQRPAPPSTVTTAGVTPQPESLSPSGKEPAASSPSSNNTAATTAAIVPGSQLMPSKSPSTGTTEISSHESSHGTPSQTTAKNWELTASASHQPPGVYPQGHSDTTVAISTSTVLLCGLSAVSLLACYLKSRQTPPLASVEMEAMEALPVTWGTSSRDEDLENCSHHL

SEQ ID NO: 522 - DNA, 711 bp, Artificial Sequence
  Description of Artificial Sequence: Synthetic polynucleotide
attacatgccctcctccaatgtctgtggagcacgccgatatttgggtgaagtcctacagcctgtacagcagagagagatacatctgcaacagcggctttaagagaaaggccggcacctcttctctgacagagtgcgtgctgaataaggccacaaatgtggcccactggacaacacctagcctgaagtgcattagagatcctgccctggtccaccagaggcctgcccctccatctacagtgacaacagccggagtgacacctcagcctgaatctctgagcccttctggaaaagaacctgccgccagctctcctagctctaataataccgccgccacaacagccgccattgtgcctggatctcagctgatgcctagcaagtctcctagcacaggcacaacagagatcagcagccacgaatcttctcacggaacaccttctcagaccaccgccaagaattgggagctgacagcctctgcctctcaccagcctccaggagtgtatcctcagggccactctgatacaacagtggccatcagcacatctacagtgctgctgtgtggactgtctgccgtgtctctgctggcctgttacctgaagtctagacagacacctcctctggcctctgtggagatggaggccatggaagccctgcctgtgacatggggaacaagcagcagagatgaggacctggagaattgttctcaccacctg

SEQ ID NO: 523 - protein, 377 aa, Artificial Sequence
  Description of Artificial Sequence: Synthetic polypeptide
NWVNVISDLKKIEDLIQSMHIDATLYTESDVHPSCKVTAMKCFLLELQVISLESGDASIHDTVENLIILANNSLSSNGNVTESGCKECEELEEKNIKEFLQSFVHIVQMFINTSSGGGSGGGGSGGGGSGGGGSGGGSLQITCPPPMSVEHADIWVKSYSLYSRERYICNSGFKRKAGTSSLTECVLNKATNVAHWTTPSLKCIRDPALVHQRPAPPSTVTTAGVTPQPESLSPSGKEPAASSPSSNNTAATTAAIVPGSQLMPSKSPSTGTTEISSHESSHGTPSQTTAKNWELTASASHQPPGVYPQGHSDTTVAISTSTVLLCGLSAVSLLACYLKSRQTPPLASVEMEAMEALPVTWGTSSRDEDLENCSHHL

SEQ ID NO: 524 - DNA, 1131 bp, Artificial Sequence
  Description of Artificial Sequence: Synthetic polynucleotide
aactgggtgaatgtgatcagcgacctgaagaagatcgaggatctgatccagagcatgcacattgatgccaccctgtacacagaatctgatgtgcaccctagctgtaaagtgaccgccatgaagtgttttctgctggagctgcaggtgatttctctggaaagcggagatgcctctatccacgacacagtggagaatctgatcatcctggccaacaatagcctgagcagcaatggcaatgtgacagagtctggctgtaaggagtgtgaggagctggaggagaagaacatcaaggagtttctgcagagctttgtgcacatcgtgcagatgttcatcaatacaagctctggcggaggatctggaggaggcggatctggaggaggaggcagtggaggcggaggatctggcggaggatctctgcagattacatgccctcctccaatgtctgtggagcacgccgatatttgggtgaagtcctacagcctgtacagcagagagagatacatctgcaacagcggctttaagagaaaggccggcacctcttctctgacagagtgcgtgctgaataaggccacaaatgtggcccactggacaacacctagcctgaagtgcattagagatcctgccctggtccaccagaggcctgcccctccatctacagtgacaacagccggagtgacacctcagcctgaatctctgagcccttctggaaaagaacctgccgccagctctcctagctctaataataccgccgccacaacagccgccattgtgcctggatctcagctgatgcctagcaagtctcctagcacaggcacaacagagatcagcagccacgaatcttctcacggaacaccttctcagaccaccgccaagaattgggagctgacagcctctgcctctcaccagcctccaggagtgtatcctcagggccactctgatacaacagtggccatcagcacatctacagtgctgctgtgtggactgtctgccgtgtctctgctggcctgttacctgaagtctagacagacacctcctctggcctctgtggagatggaggccatggaagccctgcctgtgacatggggaacaagcagcagagatgaggacctggagaattgttctcaccacctg

SEQ ID NO: 525 - protein, 395 aa, Artificial Sequence [sequence omitted]

SEQ ID NO: 526 - DNA, 1185 bp, Artificial Sequence
  Description of Artificial Sequence: Synthetic polynucleotide
atggattggacctggattctgtttctggtggccgctgccacaagagtgcacagcaactgggtgaatgtgatcagcgacctgaagaagatcgaggatctgatccagagcatgcacattgatgccaccctgtacacagaatctgatgtgcaccctagctgtaaagtgaccgccatgaagtgttttctgctggagctgcaggtgatttctctggaaagcggagatgcctctatccacgacacagtggagaatctgatcatcctggccaacaatagcctgagcagcaatggcaatgtgacagagtctggctgtaaggagtgtgaggagctggaggagaagaacatcaaggagtttctgcagagctttgtgcacatcgtgcagatgttcatcaatacaagctctggcggaggatctggaggaggcggatctggaggaggaggcagtggaggcggaggatctggcggaggatctctgcagattacatgccctcctccaatgtctgtggagcacgccgatatttgggtgaagtcctacagcctgtacagcagagagagatacatctgcaacagcggctttaagagaaaggccggcacctcttctctgacagagtgcgtgctgaataaggccacaaatgtggcccactggacaacacctagcctgaagtgcattagagatcctgccctggtccaccagaggcctgcccctccatctacagtgacaacagccggagtgacacctcagcctgaatctctgagcccttctggaaaagaacctgccgccagctctcctagctctaataataccgccgccacaacagccgccattgtgcctggatctcagctgatgcctagcaagtctcctagcacaggcacaacagagatcagcagccacgaatcttctcacggaacaccttctcagaccaccgccaagaattgggagctgacagcctctgcctctcaccagcctccaggagtgtatcctcagggccactctgatacaacagtggccatcagcacatctacagtgctgctgtgtggactgtctgccgtgtctctgctggcctgttacctgaagtctagacagacacctcctctggcctctgtggagatggaggccatggaagccctgcctgtgacatggggaacaagcagcagagatgaggacctggagaattgttctcaccacctg

SEQ ID NO: 527 - protein, 18 aa, Artificial Sequence
  Description of Artificial Sequence: Synthetic peptide
GSTSGSGKPGSGEGSTKG

SEQ ID NO: 528 - DNA, 54 bp, Artificial Sequence
  Description of Artificial Sequence: Synthetic oligonucleotide
ggcagcacctccggcagcggcaagcctggcagcggcgagggcagcaccaagggc

SEQ ID NO: 529 - protein, 26 aa, Artificial Sequence
  Description of Artificial Sequence: Synthetic peptide
SGGGSGGGGSGGGGSGGGGSGGGSLQ

SEQ ID NO: 530 - DNA, 78 bp, Artificial Sequence
  Description of Artificial Sequence: Synthetic oligonucleotide
tctggcggaggatctggaggaggcggatctggaggaggaggcagtggaggcggaggatctggcggaggatctctgcag

SEQ ID NO: 531 - protein, 3 aa, Artificial Sequence
  Description of Artificial Sequence: Synthetic peptide
GSG

SEQ ID NO: 532 - DNA, 9 bp, Artificial Sequence
  Description of Artificial Sequence: Synthetic oligonucleotide
ggaagcgga

SEQ ID NO: 533 - protein, 4 aa, Artificial Sequence
  Description of Artificial Sequence: Synthetic peptide
SGSG

SEQ ID NO: 534 - DNA, 12 bp, Artificial Sequence
  Description of Artificial Sequence: Synthetic oligonucleotide
agtggcagcggc

SEQ ID NO: 535 - protein, 15 aa, Artificial Sequence
  Description of Artificial Sequence: Synthetic peptide
GGGGSGGGGSGGGGS

SEQ ID NO: 536 - DNA, 45 bp, Artificial Sequence
  Description of Artificial Sequence: Synthetic oligonucleotide
ggtggcggtggctcgggcggtggtgggtcgggtggcggcggatct

SEQ ID NO: 537 - protein, 4 aa, Artificial Sequence
  Description of Artificial Sequence: Synthetic peptide
RAKR

SEQ ID NO: 538 - DNA, 12 bp, Artificial Sequence
  Description of Artificial Sequence: Synthetic oligonucleotide
cgtgcaaagcgt

SEQ ID NO: 539 - protein, 28 aa, Artificial Sequence
  Description of Artificial Sequence: Synthetic peptide
RAKRAPVKQTLNFDLLKLAGDVESNPGP

SEQ ID NO: 540 - DNA, 84 bp, Artificial Sequence
  Description of Artificial Sequence: Synthetic oligonucleotide
agagccaagagggcaccggtgaaacagactttgaattttgaccttctgaagttggcaggagacgttgagtccaaccctgggccc

SEQ ID NO: 541 - protein, 18 aa, Artificial Sequence
  Description of Artificial Sequence: Synthetic peptide
EGRGSLLTCGDVEENPGP

SEQ ID NO: 542 - DNA, 54 bp, Artificial Sequence
  Description of Artificial Sequence: Synthetic oligonucleotide
gagggcagaggaagtctgctaacatgcggtgacgtcgaggagaatcctggacct

SEQ ID NO: 543 - protein, 25 aa, Artificial Sequence
  Description of Artificial Sequence: Synthetic peptide
RAKRGSGEGRGSLLTCGDVEENPGP

SEQ ID NO: 544 - DNA, 75 bp, Artificial Sequence
  Description of Artificial Sequence: Synthetic oligonucleotide
agagctaagaggggaagcggagagggcagaggaagtctgctaacatgcggtgacgtcgaggagaatcctggacct

SEQ ID NO: 545 - protein, 26 aa, Artificial Sequence
  Description of Artificial Sequence: Synthetic peptide
RAKRSGSGEGRGSLLTCGDVEENPGP

SEQ ID NO: 546 - DNA, 78 bp, Artificial Sequence
  Description of Artificial Sequence: Synthetic oligonucleotide
agggccaagaggagtggcagcggcgagggcagaggaagtcttctaacatgcggtgacgtggaggagaatcccggccct

SEQ ID NO: 547 - protein, 19 aa, Artificial Sequence
  Description of Artificial Sequence: Synthetic peptide
ATNFSLLKQAGDVEENPGP

SEQ ID NO: 548 - DNA, 57 bp, Artificial Sequence
  Description of Artificial Sequence: Synthetic oligonucleotide
gcaacgaacttctctctcctaaaacaggctggtgatgtggaggagaatcctggtcca

SEQ ID NO: 549 - protein, 22 aa, Artificial Sequence
  Description of Artificial Sequence: Synthetic peptide
GSGATNFSLLKQAGDVEENPGP

SEQ ID NO: 550 - DNA, 66 bp, Artificial Sequence
  Description of Artificial Sequence: Synthetic oligonucleotide
ggaagcggagctactaacttcagcctgctgaagcaggctggagacgtggaggagaaccctggacct

SEQ ID NO: 551 - protein, 20 aa, Artificial Sequence
  Description of Artificial Sequence: Synthetic peptide
QCTNYALLKLAGDVESNPGP

SEQ ID NO: 552 - DNA, 60 bp, Artificial Sequence
  Description of Artificial Sequence: Synthetic oligonucleotide
cagtgtactaattatgctctcttgaaattggctggagatgttgagagcaaccctggacct

SEQ ID NO: 553 - protein, 22 aa, Artificial Sequence
  Description of Artificial Sequence: Synthetic peptide
VKQTLNFDLLKLAGDVESNPGP

SEQ ID NO: 554 - DNA, 66 bp, Artificial Sequence
  Description of Artificial Sequence: Synthetic oligonucleotide
gtcaaacagaccctaaactttgatctgctaaaactggccggggatgtggaaagtaatcccggcccc

SEQ ID NO: 555 - protein, 31 aa, Artificial Sequence
  Description of Artificial Sequence: Synthetic polypeptide
RAKRAPVKQGSGATNFSLLKQAGDVEENPGP

SEQ ID NO: 556 - DNA, 93 bp, Artificial Sequence
  Description of Artificial Sequence: Synthetic oligonucleotide
cgtgcaaagcgtgcaccggtgaaacagggaagcggagctactaacttcagcctgctgaagcaggctggagacgtggaggagaaccctggacct

SEQ ID NO: 557 - protein, 8 aa, Artificial Sequence
  Description of Artificial Sequence: Synthetic peptide
APVKQGSG

SEQ ID NO: 558 - DNA, 24 bp, Artificial Sequence
  Description of Artificial Sequence: Synthetic oligonucleotide
gcaccggtgaaacagggaagcgga

SEQ ID NO: 559 - protein, 19 aa, Artificial Sequence
  Description of Artificial Sequence: Synthetic peptide
GGGGSGGGSGGGGSGGGGS

SEQ ID NO: 560 - DNA, 60 bp, Artificial Sequence
  Description of Artificial Sequence: Synthetic oligonucleotide
ggtggcggtggctcgggcggtggtgggtcgggtggcggcggatctggtggcggtggctcg

SEQ ID NO: 561 - protein, 5 aa, Artificial Sequence
  Description of Artificial Sequence: Synthetic peptide
APVKQ

SEQ ID NO: 562 - DNA, 15 bp, Artificial Sequence
  Description of Artificial Sequence: Synthetic oligonucleotide
gcaccggtgaaacag

SEQ ID NO: 563 - protein, 27 aa, Artificial Sequence
  Description of Artificial Sequence: Synthetic peptide
  SITE (2)..(26): This region may encompass 2-5 "Glu Ala Ala Ala Lys" repeating units
AEAAAKEAAAKEAAAKEAAAKEAAAKA

SEQ ID NO: 564 - skipped

SEQ ID NO: 565 - protein, 171 aa, Artificial Sequence
  Description of Artificial Sequence: Synthetic polypeptide
RKVCNGIGIGEFKDSLSINATNIKHFKNCTSISGDLHILPVAFRGDSFTHTPPLDPQELDILKTVKEITGFLLIQAWPENRTDLHAFENLEIIRGRTKQHGQFSLAVVSLNITSLGLRSLKEISDGDVIISGNKNLCYANTINWKKLFGTSGQKTKIISNRGENSCKATGQ

SEQ ID NO: 566 - DNA, 513 bp, Artificial Sequence
  Description of Artificial Sequence: Synthetic polynucleotide
cgcaaagtgtgtaacggaataggtattggtgaatttaaagactcactctccataaatgctacgaatattaaacacttcaaaaactgcacctccatcagtggcgatctccacatcctgccggtggcatttaggggtgactccttcacacatactcctcctctggatccacaggaactggatattctgaaaaccgtaaaggaaatcacagggtttttgctgattcaggcttggcctgaaaacaggacggacctccatgcctttgagaacctagaaatcatacgcggcaggaccaagcaacatggtcagttttctcttgcagtcgtcagcctgaacataacatccttgggattacgctccctcaaggagataagtgatggagatgtgataatttcaggaaacaaaaatttgtgctatgcaaatacaataaactggaaaaaactgtttgggacctccggtcagaaaaccaaaattataagcaacagaggtgaaaacagctgcaaggccacaggccag

SEQ ID NO: 567 - protein, 21 aa, Artificial Sequence
  Description of Artificial Sequence: Synthetic peptide
VCHALCSPEGCWGPEPRDCVS

SEQ ID NO: 568 - DNA, 63 bp, Artificial Sequence
  Description of Artificial Sequence: Synthetic oligonucleotide
gtctgccatgccttgtgctcccccgagggctgctggggcccggagcccagggactgcgtctct

SEQ ID NO: 569 - protein, 335 aa, Artificial Sequence
  Description of Artificial Sequence: Synthetic polypeptide
RKVCNGIGIGEFKDSLSINATNIKHFKNCTSISGDLHILPVAFRGDSFTHTPPLDPQELDILKTVKEITGFLLIQAWPENRTDLHAFENLEIIRGRTKQHGQFSLAVVSLNITSLGLRSLKEISDGDVIISGNKNLCYANTINWKKLFGTSGQKTKIISNRGENSCKATGQVCHALCSPEGCWGPEPRDCVSCRNVSRGRECVDKCNLLEGEPREFVENSECIQCHPECLPQAMNITCTGRGPDNCIQCAHYIDGPHCVKTCPAGVMGENNTLVWKYADAGHVCHLCHPNCTYGCTGPGLEGCPTNGPKIPSIATGMVGALLLLLVVALGIGLFM

SEQ ID NO: 570 - DNA, 1005 bp, Artificial Sequence
  Description of Artificial Sequence: Synthetic polynucleotide
cgcaaagtgtgtaacggaataggtattggtgaatttaaagactcactctccataaatgctacgaatattaaacacttcaaaaactgcacctccatcagtggcgatctccacatcctgccggtggcatttaggggtgactccttcacacatactcctcctctggatccacaggaactggatattctgaaaaccgtaaaggaaatcacagggtttttgctgattcaggcttggcctgaaaacaggacggacctccatgcctttgagaacctagaaatcatacgcggcaggaccaagcaacatggtcagttttctcttgcagtcgtcagcctgaacataacatccttgggattacgctccctcaaggagataagtgatggagatgtgataatttcaggaaacaaaaatttgtgctatgcaaatacaataaactggaaaaaactgtttgggacctccggtcagaaaaccaaaattataagcaacagaggtgaaaacagctgcaaggccacaggccaggtctgccatgccttgtgctcccccgagggctgctggggcccggagcccagggactgcgtctcttgccggaatgtcagccgaggcagggaatgcgtggacaagtgcaaccttctggagggtgagccaagggagtttgtggagaactctgagtgcatacagtgccacccagagtgcctgcctcaggccatgaacatcacctgcacaggacggggaccagacaactgtatccagtgtgcccactacattgacggcccccactgcgtcaagacctgcccggcaggagtcatgggagaaaacaacaccctggtctggaagtacgcagacgccggccatgtgtgccacctgtgccatccaaactgcacctacggatgcactgggccaggtcttgaaggctgtccaacgaatgggcctaagatcccgtccatcgccactgggatggtgggggccctcctcttgctgctggtggtggccctggggatcggcctcttcatg

SEQ ID NO: 571 - protein, 243 aa, Artificial Sequence
  Description of Artificial Sequence: Synthetic polypeptide
RKVCNGIGIGEFKDSLSINATNIKHFKNCTSISGDLHILPVAFRGDSFTHTPPLDPQELDILKTVKEITGFLLIQAWPENRTDLHAFENLEIIRGRTKQHGQFSLAVVSLNITSLGLRSLKEISDGDVIISGNKNLCYANTINWKKLFGTSGQKTKIISNRGENSCKATGQVCHALCSPEGCWGPEPRDCVSGGGGSGGGSGGGGSGGGGSFWVLVVVGGVLACYSLLVTVAFIIFWVRSKRS

SEQ ID NO: 572 - DNA, 735 bp, Artificial Sequence
  Description of Artificial Sequence: Synthetic polynucleotide
cgcaaagtgtgtaacggaataggtattggtgaatttaaagactcactctccataaatgctacgaatattaaacacttcaaaaactgcacctccatcagtggcgatctccacatcctgccggtggcatttaggggtgactccttcacacatactcctcctctggatccacaggaactggatattctgaaaaccgtaaaggaaatcacagggtttttgctgattcaggcttggcctgaaaacaggacggacctccatgcctttgagaacctagaaatcatacgcggcaggaccaagcaacatggtcagttttctcttgcagtcgtcagcctgaacataacatccttgggattacgctccctcaaggagataagtgatggagatgtgataatttcaggaaacaaaaatttgtgctatgcaaatacaataaactggaaaaaactgtttgggacctccggtcagaaaaccaaaattataagcaacagaggtgaaaacagctgcaaggccacaggccaggtctgccatgccttgtgctcccccgagggctgctggggcccggagcccagggactgcgtctctggtggcggtggctcgggcggtggtgggtcgggtggcggcggatctggtggcggtggctcgttttgggtgctggtggtggttggtggagtcctggcttgctatagcttgctagtaacagtggcctttattattttctgggtgaggagtaagaggagctaa

SEQ ID NO: 573 - protein, 297 aa, Artificial Sequence
  Description of Artificial Sequence: Synthetic polypeptide
MTTPRNSVNGTFPAEPMKGPIAMQSGPKPLFRRMSSLVGPTQSFFMRESKTLGAVQIMNGLFHIALGGLLMIPAGIYAPICVTVWYPLWGGIMYIISGSLLAATEKNSRKCLVKGKMIMNSLSLFAAISGMILSIMDILNIKISHFLKMESLNFIRAHTPYINIYNCEPANPSEKNSPSTQYCYSIQSLFLGILSVMLIFAFFQELVIAGIVENEWKRTCSRPKSNIVLLSAEEKKEQTIEIKEEVVGLTETSSQPKNEEDIEIIPIQEEEEEETETNFPEPPQDQESSPIENDSSP

SEQ ID NO: 574 - DNA, 891 bp, Artificial Sequence
  Description of Artificial Sequence: Synthetic polynucleotide
atgacaacacccagaaattcagtaaatgggactttcccggcagagccaatgaaaggccctattgctatgcaatctggtccaaaaccactcttcaggaggatgtcttcactggtgggccccacgcaaagcttcttcatgagggaatctaagactttgggggctgtccagattatgaatgggctcttccacattgccctggggggtcttctgatgatcccagcagggatctatgcacccatctgtgtgactgtgtggtaccctctctggggaggcattatgtatattatttccggatcactcctggcagcaacggagaaaaactccaggaagtgtttggtcaaaggaaaaatgataatgaattcattgagcctctttgctgccatttctggaatgattctttcaatcatggacatacttaatattaaaatttcccattttttaaaaatggagagtctgaattttattagagctcacacaccatatattaacatatacaactgtgaaccagctaatccctctgagaaaaactccccatctacccaatactgttacagcatacaatctctgttcttgggcattttgtcagtgatgctgatctttgccttcttccaggaacttgtaatagctggcatcgttgagaatgaatggaaaagaacgtgctccagacccaaatctaacatagttctcctgtcagcagaagaaaaaaaagaacagactattgaaataaaagaagaagtggttgggctaactgaaacatcttcccaaccaaagaatgaagaagacattgaaattattccaatccaagaagaggaagaagaagaaacagagacgaactttccagaacctccccaagatcaggaatcctcaccaatagaaaatgacagctctcct

SEQ ID NO: 575 - protein, 263 aa, Artificial Sequence
  Description of Artificial Sequence: Synthetic polypeptide
MTTPRNSVNGTFPAEPMKGPIAMQSGPKPLFRRMSSLVGPTQSFFMRESKTLGAVQIMNGLFHIALGGLLMIPAGIYAPICVTVWYPLWGGIMYIISGSLLAATEKNSRKCLVKGKMIMNSLSLFAAISGMILSIMDILNIKISHFLKMESLNFIRAHTPYINIYNCEPANPSEKNSPSTQYCYSIQSLFLGILSVMLIFAFFQELVIAGIVENEWKRTCSRPKSNIVLLSAEEKKEQTIEIKEEVVGLTETSSQPKNEEDIE

SEQ ID NO: 576 - DNA, 789 bp, Artificial Sequence
  Description of Artificial Sequence: Synthetic polynucleotide
atgaccacaccacggaactctgtgaatggcaccttcccagcagagccaatgaagggaccaatcgcaatgcagagcggacccaagcctctgtttcggagaatgagctccctggtgggcccaacccagtccttctttatgagagagtctaagacactgggcgccgtgcagatcatgaacggactgttccacatcgccctgggaggactgctgatgatcccagccggcatctacgcccctatctgcgtgaccgtgtggtaccctctgtggggcggcatcatgtatatcatctccggctctctgctggccgccacagagaagaacagcaggaagtgtctggtgaagggcaagatgatcatgaatagcctgtccctgtttgccgccatctctggcatgatcctgagcatcatggacatcctgaacatcaagatcagccacttcctgaagatggagagcctgaacttcatcagagcccacaccccttacatcaacatctataattgcgagcctgccaacccatccgagaagaattctccaagcacacagtactgttattccatccagtctctgttcctgggcatcctgtctgtgatgctgatctttgccttctttcaggagctggtcatcgccggcatcgtggagaacgagtggaagaggacctgcagccgccccaagtccaatatcgtgctgctgtccgccgaggagaagaaggagcagacaatcgagatcaaggaggaggtggtgggcctgaccgagacatctagccagcctaagaatgaggaggatatcgag

SEQ ID NO: 577 - DNA, 404 bp, Artificial Sequence
  Description of Artificial Sequence: Synthetic polynucleotide
gccgcaataaaatatctttattttcattacatctgtgtgttggttttttgtgtgaatcgtaactaacatacgctctccatcaaaacaaaacgaaacaaaacaaactagcaaaataggctgtccccagtgcaagtgcaggtgccagaacatttctctatcgaaggatctgcgatcgctccggtgcccgtcagtgggcagagcgcacatcgcccacagtccccgagaagttggggggaggggtcggcaattgaaccggtgcctagagaaggtggcgcggggtaaactgggaaagtgatgtcgtgtactggctccgcctttttcccgagggtgggggagaaccgtatataagtgcagtagtcgccgtgaacgttctttttcgcaacgggtttgccgccagaacacag

SEQ ID NO: 578 - DNA, 205 bp, Artificial Sequence
  Description of Artificial Sequence: Synthetic polynucleotide
gtgatgcggttttggcagtacatcaatgggcgtggatagcggtttgactcacggggatttccaagtctccaccccattgacgtcaatgggagtttgttttggcaccaaaatcaacgggactttccaaaatgtcgtaacaactccgccccattgacgcaaatgggcggtaggcgtgtacggtgggaggtctatataagcagagctc

SEQ ID NO: 579 - DNA, 674 bp, Artificial Sequence
  Description of Artificial Sequence: Synthetic polynucleotide
tgtgagcaaaaggccagcaaaaggccaggaaccgtaaaaaggccgcgttgctggcgtttttccataggctccgcccccctgacgagcatcacaaaaatcgacgctcaagtcagaggtggcgaaacccgacaggactataaagataccaggcgtttccccctggaagctccctcgtgcgctctcctgttccgaccctgccgcttaccggatacctgtccgcctttctcccttcgggaagcgtggcgctttctcatagctcacgctgtaggtatctcagttcggtgtaggtcgttcgctccaagctgggctgtgtgcacgaaccccccgttcagcccgaccgctgcgccttatccggtaactatcgtcttgagtccaacccggtaagacacgacttatcgccactggcagcagccactggtaacaggattagcagagcgaggtatgtaggcggtgctacagagttcttgaagtggtggcctaactacggctacactagaagaacagtatttggtatctgcgctctgctgaagccagttaccttcggaaaaagagttggtagctcttgatccggcaaacaaaccaccgctggtagcggtggtttttttgtttgcaagcagcagattacgcgcagaaaaaaaggatctcaagaagatcctttgatcttttctacgggg

SEQ ID NO: 580 - DNA, 287 bp, Artificial Sequence
  Description of Artificial Sequence: Synthetic polynucleotide
ctacagttgaagtcggaagtttacatacacttaagttggagtcattaaaactcgtttttcaactactccacaaatttcttgttaacaaacaatagttttggcaagtcagttaggacatctactttgtgcatgacacaagtcatttttccaacaattgtttacagacagattatttcacttataattcactgtatcacaattccagtgggtcagaagtttacatacactaagttgactgtgcctttaaacagcttggaaaattccagaaaatgatgtcatggctttag

SEQ ID NO: 581 - DNA, 299 bp, Artificial Sequence
  Description of Artificial Sequence: Synthetic polynucleotide
gtggaaggctactcgaaatgtttgacccaagttaaacaatttaaaggcaatgctaccaaatactaattgagtgtatgttaacttctgacccactgggaatgtgatgaaagaaataaaagctgaaatgaatcattctctctactattattctgatatttcacattcttaaaataaagtggtgatcctaactgaccttaagacagggaatctttactcggattaaatgtcaggaattgtgaaaaagtgagtttaaatgtatttggctaaggtgtatgtaaacttccgacttcaactgtagg

SEQ ID NO: 582 - DNA, 186 bp, Artificial Sequence
  Description of Artificial Sequence: Synthetic polynucleotide
gatgctacaagtggcccacttctgagatgcgggctgcttctggatgacactgcttcccgaggcatttcgccctatctgcaagtactatggattactttgctagtggtgtagatagggtgaaatgtttcggcaagtgcctcctcgctggccccagggtaccacccggagcacaggtttggtgacctt

SEQ ID NO: 583 - DNA, 207 bp, Artificial Sequence
  Description of Artificial Sequence: Synthetic polynucleotide
agggactgggcccacggggaggcagcgtccccgaggcagcagcggcagcggcggctcctctccccatggccctgtcacaacctcctagaaagagtactgggctcagaccctctttcaggccgttgtgacagggacctggggaccccggcaccggcaggccccaaggggtgaggtgagcgggcattgggacctcccctccctgtactc

SEQ ID NO: 584 - DNA, 210 bp, Artificial Sequence
  Description of Artificial Sequence: Synthetic polynucleotide
aggagggtgggggtggaggcaagcagaggacttcctgatcgcgtacccatggctacagtctttcttcatgtgactcgtggacttgtactacacaaaagtactgtgagaatatatgaaggacaggctttagtgtagtatgcgttcaattgtcatcactggcatcttttttgatcattgcaccatcatcaaatgcattgggataaccatgac

SEQ ID NO: 585 - DNA, 210 bp, Artificial Sequence
  Description of Artificial Sequence: Synthetic polynucleotide
ggtaagtcatgactccctacaatggacatgatcatagtaggtactataaggcacctagctataccctcctatagagagtttgagtctattgtagcaagtctttcttttagggcctaggactcttcccactctcttccatcgcctaagctctaactcttccttgtagtagaaataagtcacttctaaggctgggaccctcctagaccctaa

SEQ ID NO: 586 - DNA, 354 bp, Artificial Sequence
  Description of Artificial Sequence: Synthetic polynucleotide
ttaggatgagttgagatcccagtgatcttctcgctaagagtttcctgcctgggcaaggaggaaagatgctacaagtggcccacttctgagatgcgggctgcttctggatgacactgcttcccgaggcatttcgccctatctgcaagtactatggattactttgctagtggtgtagatagggtgaaatgtttcggcaagtgcctcctcgctggccccagggtaccacccggagcacaggtttggtgaccttcttcctcatcagggctttgtgccagcaaatgactccctcaccaaggaagcaagagcctctgaatcccatctgggctcttcctgaacacccctatctccccctct

SEQ ID NO: 587 - protein, 926 aa, Artificial Sequence
  Description of Artificial Sequence: Synthetic polypeptide
PLLALLAALLLAARGAAAQETELSVSAELVPTSSWNISSELNKDSYLTLDEPMNNITTSLGQTAELHCKVSGNPPPTIRWFKNDAPVVQEPRRLSFRSTIYGSRLRIRNLDTTDTGYFQCVATNGKEVVSSTGVLFVKFGPPPTASPGYSDEYEEDGFCQPYRGIACARFIGNRTVYMESLHMQGEIENQITAAFTMIGTSSHLSDKCSQFAIPSLCHYAFPYCDETSSVPKPRDLCRDECEILENVLCQTEYIFARSNPMILMRLKLPNCEDLPQPESPEAANCIRIGIPMADPINKNHKCYNSTGVDYRGTVSVTKSGRQCQPWNSQYPHTHTFTALRFPELNGGHSYCRNPGNQKEAPWCFTLDENFKSDLCDIPACDSKDSKEKNKMEILYILVPSVAIPLAIALLFFFICVCRNNQKSSSAPVQRQPKHVRGQNVEMSMLNAYKPKSKAKELPLSAVRFMEELGECAFGKIYKGHLYLPGMDHAQLVAIKTLKDYNNPQQWTEFQQEASLMAELHHPNIVCLLGAVTQEQPVCMLFEYINQGDLHEFLIMRSPHSDVGCSSDEDGTVKSSLDHGDFLHIAIQIAAGMEYLSSHFFVHKDLAARNILIGEQLHVKISDLGLSREIYSADYYRVQSKSLLPIRWMPPEAIMYGKFSSDSDIWSFGVVLWEIFSFGLQPYYGFSNQEVIEMVRKRQLLPCSEDCPPRMYSLMTECWNEIPSRRPRFKDIHVRLRSWEGLSSHTSSTTPSGGNATTQTTSLSASPVSNLSNPRYPNYMFPSQGITPQGQIAGFIGPPIPQNQRFIPINGYPIPPGYAAFPAAHYQPTGPPRVIQHCPPPKSRSPSSASGSTSTGHVTSLPSSGSNQEANIPLLPHMSIPNHPGGMGITVFGNKSQKPYKIDSKQASLLGDANIHGHTESMISAEL

SEQ ID NO: 588 - DNA, 2811 bp, Artificial Sequence
  Description of Artificial Sequence: Synthetic polynucleotide
atgcaccggccgcgccgccgcgggacgcgcccgccgctcctggcgctgctggccgcgctgctgctggccgcacgcggggctgctgcccaagaaacagagctgtcagtcagtgctgaattagtgcctacctcatcatggaacatctcaagtgaactcaacaaagattcttacctgaccctcgatgaaccaatgaataacatcaccacgtctctgggccagacagcagaactgcactgcaaagtctctgggaatccacctcccaccatccgctggttcaaaaatgatgctcctgtggtccaggagccccggaggctctcctttcggtccaccatctatggctctcggctgcggattagaaacctcgacaccacagacacaggctacttccagtgcgtggcaacaaacggcaaggaggtggtttcttccactggagtcttgtttgtcaagtttggcccccctcccactgcaagtccaggatactcagatgagtatgaagaagatggattctgtcagccatacagagggattgcatgtgcaagatttattggcaaccgcaccgtctatatggagtctttgcacatgcaaggggaaatagaaaatcagatcacagctgccttcactatgattggcacttccagtcacttatctgataagtgttctcagttcgccattccttccctgtgccactatgccttcccgtactgcgatgaaacttcatccgtcccaaagccccgtgacttgtgtcgcgatgaatgtgaaatcctggagaatgtcctgtgtcaaacagagtacatttttgcaagatcaaatcccatgattctgatgaggctgaaactgccaaactgtgaagatctcccccagccagagagcccagaagctgcgaactgtatccggattggaattcccatggcagatcctataaataaaaatcacaagtgttataacagcacaggtgtggactaccgggggaccgtcagtgtgaccaaatcagggcgccagtgccagccatggaattcccagtatccccacacacacactttcaccgcccttcgtttcccagagctgaatggaggccattcctactgccgcaacccagggaatcaaaaggaagctccctggtgcttcaccttggatgaaaactttaagtctgatctgtgtgacatcccagcgtgcgattcaaaggattccaaggagaagaataaaatggaaatcctgtacatactagtgccaagtgtggccattcccctggccattgctttactcttcttcttcatttgcgtctgtcggaataaccagaagtcatcgtcggcaccagtccagaggcaaccaaaacacgtcagaggtcaaaatgtagagatgtcaatgctgaatgcatataaacccaagagcaaggctaaagagctacctctttctgctgtacgctttatggaagaattgggtgagtgtgcctttggaaaaatctataaaggccatctctatctcccaggcatggaccatgctcagctggttgctatcaagaccttgaaagactataacaacccccagcaatggacggaatttcaacaagaagcctccctaatggcagaactgcaccaccccaatattgtctgccttctaggtgccgtcactcaggaacaacctgtgtgcatgctttttgagtatattaatcagggggatctccatgagttcctcatcatgagatccccacactctgatgttggctgcagcagtgatgaagatgggactgtgaaatccagcctggaccacggagattttctgcacattgcaattcagattgcagctggcatggaatacctgtctagtcacttctttgtccacaaggaccttgcagctcgcaatattttaatcggagagcaacttcatgtaaagatttcagacttggggctttccagagaaatttactccgctgattactacagggtccagagtaagtccttgctgcccattcgctggatgccccctgaagccatcatgtatggcaaattctcttctgattcagatatctggtcctttggggttgtcttgtgggagattttcagttttggactccagccatattatggattcagtaaccaggaagtgattgagatggtgagaaaacggcagctcttaccatgctctgaagactgcccacccagaatgtacagcctcatgacagagtgctggaatgagattccttctaggagaccaagatttaaagatattcacgtccggcttcggtcctgggagggactctcaagtcacacaagctctactactccttcagggggaaatgccaccacacagacaacctccctcagtgccagcccagtgagtaatctcagtaaccccagatatcctaattacatgttcccgagccagggtattacaccacagggccagattgctggtttcattggcccgccaatacctcagaaccagcgattcattcccatcaatggatacccaatacctcctggatatgcagcgtttccagctgcccactaccagccaacaggtcctcccagagtgattcagcactgcccacctcccaagagtcggtccccaagcagtgccagtgggtcgactagcactggccatgtgactagcttgccctcatcaggatccaatcaggaagcaaatattcctttactaccacacatgtcaattccaaatcatcctggtggaatgggtatcaccgtttttggcaacaaatctcaaaaaccctacaaaattgactcaaagcaagcatctttactaggagacgccaatattcatggacacaccgaatctatgatttctgcagaactg

SEQ ID NO: 589 - protein, 437 aa, Artificial Sequence
  Description of Artificial Sequence: Synthetic polypeptide
MHRPRRRGTRPPLLALLAALLLAARGAAAQETELSVSAELVPTSSWNISSELNKDSYLTLDEPMNNITTSLGQTAELHCKVSGNPPPTIRWFKNDAPVVQEPRRLSFRSTIYGSRLRIRNLDTTDTGYFQCVATNGKEVVSSTGVLFVKFGPPPTASPGYSDEYEEDGFCQPYRGIACARFIGNRTVYMESLHMQGEIENQITAAFTMIGTSSHLSDKCSQFAIPSLCHYAFPYCDETSSVPKPRDLCRDECEILENVLCQTEYIFARSNPMILMRLKLPNCEDLPQPESPEAANCIRIGIPMADPINKNHKCYNSTGVDYRGTVSVTKSGRQCQPWNSQYPHTHTFTALRFPELNGGHSYCRNPGNQKEAPWCFTLDENFKSDLCDIPACDSKDSKEKNKMEILYILVPSVAIPLAIALLFFFICVCRNNQKSSSA

SEQ ID NO: 590 - DNA, 1311 bp, Artificial Sequence
  Description of Artificial Sequence: Synthetic polynucleotide
atgcaccggccgcgccgccgcgggacgcgcccgccgctcctggcgctgctggccgcgctgctgctggccgcacgcggggctgctgcccaagaaacagagctgtcagtcagtgctgaattagtgcctacctcatcatggaacatctcaagtgaactcaacaaagattcttacctgaccctcgatgaaccaatgaataacatcaccacgtctctgggccagacagcagaactgcactgcaaagtctctgggaatccacctcccaccatccgctggttcaaaaatgatgctcctgtggtccaggagccccggaggctctcctttcggtccaccatctatggctctcggctgcggattagaaacctcgacaccacagacacaggctacttccagtgcgtggcaacaaacggcaaggaggtggtttcttccactggagtcttgtttgtcaagtttggcccccctcccactgcaagtccaggatactcagatgagtatgaagaagatggattctgtcagccatacagagggattgcatgtgcaagatttattggcaaccgcaccgtctatatggagtctttgcacatgcaaggggaaatagaaaatcagatcacagctgccttcactatgattggcacttccagtcacttatctgataagtgttctcagttcgccattccttccctgtgccactatgccttcccgtactgcgatgaaacttcatccgtcccaaagccccgtgacttgtgtcgcgatgaatgtgaaatcctggagaatgtcctgtgtcaaacagagtacatttttgcaagatcaaatcccatgattctgatgaggctgaaactgccaaactgtgaagatctcccccagccagagagcccagaagctgcgaactgtatccggattggaattcccatggcagatcctataaataaaaatcacaagtgttataacagcacaggtgtggactaccgggggaccgtcagtgtgaccaaatcagggcgccagtgccagccatggaattcccagtatccccacacacacactttcaccgcccttcgtttcccagagctgaatggaggccattcctactgccgcaacccagggaatcaaaaggaagctccctggtgcttcaccttggatgaaaactttaagtctgatctgtgtgacatcccagcgtgcgattcaaaggattccaaggagaagaataaaatggaaatcctgtacatactagtgccaagtgtggccattcccctggccattgctttactcttcttcttcatttgcgtctgtcggaataaccagaagtcatcgtcggca

SEQ ID NO: 591 - protein, 654 aa, Artificial Sequence
  Description of Artificial Sequence: Synthetic polypeptide
DIKMTQSPSSMYASLGERVTITCKASPDINSYLSWFQQKPGKSPKTLIYRANRLVDGVPSRFSGGGSGQDYSLTINSLEYEDMGIYYCLQYDEFPYTFGGGTKLEMKGSTSGSGKPGSGEGSTKGEVKLVESGGGLVKPGGSLKLSCAASGFTFSSYAMSWVRQIPEKRLEWVASISRGGTTYYPDSVKGRFTISRDNVRNILYLQMSSLRSEDTAMYYCGRYDYDGYYAMDYWGQGTSVTVSSESKYGPPCPPCPAPEFEGGPSVFLFPPKPKDTLMISRTPEVTCVVVDVSQEDPEVQFNWYVDGVEVHNAKTKPREEQFQSTYRVVSVLTVLHQDWLNGKEYKCKVSNKGLPSSIEKTISKAKGQPREPQVYTLPPSQEEMTKNQVSLTCLVKGFYPSDIAVEWESNGQPENNYKTTPPVLDSDGSFFLYSRLTVDKSRWQEGNVFSCSVMHEALHNHYTQKSLSLSLGKMFWVLVVVGGVLACYSLLVTVAFIIFWVRSKRSRGGHSDYMNMTPRRPGPTRKHYQPYAPPRDFAAYRSRVKFSRSADAPAYQQGQNQLYNELNLGRREEYDVLDKRRGRDPEMGGKPRRKNPQEGLYNELQKDKMAEAYSEIGMKGERRRGKGHDGLYQGLSTATKDTYDALHMQALPPR

SEQ ID NO: 592 - DNA, 1962 bp, Artificial Sequence
  Description of Artificial Sequence: Synthetic polynucleotide
gacatcaagatgacccagagccccagctctatgtacgccagcctgggcgagcgcgtgaccatcacatgcaaggccagccccgacatcaacagctacctgtcctggttccagcagaagcccggcaagagccccaagaccctgatctaccgggccaaccggctggtggacggcgtgccaagcagattttccggcggaggcagcggccaggactacagcctgaccatcaacagcctggaatacgaggacatgggcatctactactgcctgcagtacgacgagttcccctacaccttcggaggcggcaccaagctggaaatgaagggcagcacctccggcagcggcaagcctggcagcggcgagggcagcaccaagggcgaagtgaagctggtggaaagcggcggaggcctggtgaaacctggcggcagcctgaagctgagctgcgccgccagcggcttcaccttcagcagctacgccatgagctgggtccgacagatccccgagaagcggctggaatgggtggccagcatcagcaggggcggcaccacctactaccccgacagcgtgaagggccggttcaccatcagccgggacaacgtgcggaacatcctgtacctgcagatgagcagcctgcggagcgaggacaccgccatgtactactgcggcagatacgactacgacggctactacgccatggattactggggccagggcaccagcgtgaccgtgtctagcgagagcaagtacggccctccctgccccccttgccctgcccccgagttcgagggcggacccagcgtgttcctgttcccccccaagcccaaggacaccctgatgatcagccggacccccgaggtgacctgtgtggtggtggacgtgtcccaggaggaccccgaggtccagttcaactggtacgtggacggcgtggaggtgcacaacgccaagaccaagccccgggaggagcagttccagagcacctaccgggtggtgtccgtgctgaccgtgctgcaccaggactggctgaacggcaaggaatacaagtgtaaggtgtccaacaagggcctgcccagcagcatcgagaaaaccatcagcaaggccaagggccagcctcgggagccccaggtgtacaccctgccccctagccaagaggagatgaccaagaatcaggtgtccctgacctgcctggtgaagggcttctaccccagcgacatcgccgtggagtgggagagcaacggccagcccgagaacaactacaagaccaccccccctgtgctggacagcgacggcagcttcttcctgtacagcaggctgaccgtggacaagagccggtggcaggagggcaacgtctttagctgctccgtgatgcacgaggccctgcacaaccactacacccagaagagcctgtccctgagcctgggcaagatgttctgggtgctggtcgtggtgggtggcgtgctggcctgctacagcctgctggtgacagtggccttcatcatcttttgggtgaggagcaagcggagcagaggcggccacagcgactacatgaacatgaccccccggaggcctggccccacccggaagcactaccagccctacgcccctcccagggacttcgccgcctaccggagccgggtgaagttcagccggagcgccgacgcccctgcctaccagcagggccagaaccagctgtacaacgagctgaacctgggccggagggaggagtacgacgtgctggacaagcggagaggccgggaccctgagatgggcggcaagccccggagaaagaaccctcaggagggcctgtataacgaactgcagaaagacaagatggccgaggcctacagcgagatcggcatgaagggcgagcggcggaggggcaagggccacgacggcctgtaccagggcctgagcaccgccaccaaggatacctacgacgccctgcacatgcaggccctgccccccaga

SEQ ID NO: 593 - protein, 663 aa, Artificial Sequence
  Description of Artificial Sequence: Synthetic polypeptide
DIKMTQSPSSMYASLGERVTITCKASPDINSYLSWFQQKPGKSPKTLIYRANRLVDGVPSRFSGGGSGQDYSLTINSLEYEDMGIYYCLQYDEFPYTFGGGTKLEMKGSTSGSGKPGSGEGSTKGEVKLVESGGGLVKPGGSLKLSCAASGFTFSSYAMSWVRQIPEKRLEWVASISRGGTTYYPDSVKGRFTISRDNVRNILYLQMSSLRSEDTAMYYCGRYDYDGYYAMDYWGQGTSVTVSSQGTSVTVSSESKYGPPCPPCPAPEFLGGPSVFLFPPKPKDTLMISRTPEVTCVVVDVSQEDPEVQFNWYVDGVEVHNAKTKPREEQFNSTYRVVSVLTVLHQDWLNGKEYKCKVSNKGLPSSIEKTISKAKGQPREPQVYTLPPSQEEMTKNQVSLTCLVKGFYPSDIAVEWESNGQPENNYKTTPPVLDSDGSFFLYSRLTVDKSRWQEGNVFSCSVMHEALHNHYTQKSLSLSLGKMFWVLVVVGGVLACYSLLVTVAFIIFWVRSKRSRGGHSDYMNMTPRRPGPTRKHYQPYAPPRDFAAYRSRVKFSRSADAPAYQQGQNQLYNELNLGRREEYDVLDKRRGRDPEMGGKPRRKNPQEGLYNELQKDKMAEAYSEIGMKGERRRGKGHDGLYQGLSTATKDTYDALHMQALPPR

SEQ ID NO: 594 - DNA, 1989 bp, Artificial Sequence
  Description of Artificial Sequence: Synthetic polynucleotide
gacatcaagatgacccagagccccagctctatgtacgccagcctgggcgagcgcgtgaccatcacatgcaaggccagccccgacatcaacagctacctgtcctggttccagcagaagcccggcaagagccccaagaccctgatctaccgggccaaccggctggtggacggcgtgccaagcagattttccggcggaggcagcggccaggactacagcctgaccatcaacagcctggaatacgaggacatgggcatctactactgcctgcagtacgacgagttcccctacaccttcggaggcggcaccaagctggaaatgaagggcagcaccagcggcagcggcaagcctggaagcggcgagggctccaccaagggcgaagtgaagctggtggaaagcggcggaggcctggtgaaacctggcggcagcctgaagctgagctgcgccgccagcggcttcaccttcagcagctacgccatgagctgggtccgacagatccccgagaagcggctggaatgggtggccagcatcagcaggggcggcaccacctactaccccgacagcgtgaagggccggttcaccatcagccgggacaacgtgcggaacatcctgtacctgcagatgagcagcctgcggagcgaggacaccgccatgtactactgcggcagatacgactacgacggctactacgccatggattactggggccagggcaccagcgtgaccgtgtctagccagggaacctccgtgacagtgtccagcgagtccaaatatggtcccccatgcccaccatgcccagcacctgagttcctggggggaccatcagtcttcctgttccccccaaaacccaaggacactctcatgatctcccggacccctgaggtcacgtgcgtggtggtggacgtgagccaggaagaccccgaggtccagttcaactggtacgtggatggcgtggaggtgcataatgccaagacaaagccccgggaggagcagttcaatagcacctaccgggtggtgtccgtgctgaccgtgctgcaccaggactggctgaacggcaaggaatacaagtgtaaggtgtccaacaagggcctgcccagcagcatcgagaaaaccatcagcaaggccaagggccagcctcgggagccccaggtgtacaccctgccccctagccaagaggagatgaccaagaatcaggtgtccctgacctgcctggtgaagggcttctaccccagcgacatcgccgtggagtgggagagcaacggccagcccgagaacaactacaagaccaccccccctgtgctggacagcgacggcagcttcttcctgtacagcaggctgaccgtggacaagagccggtggcaggagggcaacgtctttagctgctccgtgatgcacgaggccctgcacaaccactacacccagaagagcctgtccctgagcctgggcaagatgttctgggtgctggtcgtggtgggtggcgtgctggcctgctacagcctgctggtgacagtggccttcatcatcttttgggtgaggagcaagcggagcagaggcggccacagcgactacatgaacatgaccccccggaggcctggccccacccggaagcactaccagccctacgcccctcccagggacttcgccgcctaccggagccgggtgaagttcagccggagcgccgacgcccctgcctaccagcagggccagaaccagctgtacaacgagctgaacctgggccggagggaggagtacgacgtgctggacaagcggagaggccgggaccctgagatgggcggcaagccccggagaaagaaccctcaggagggcctgtataacgaactgcagaaagacaagatggccgaggcctacagcgagatcggcatgaagggcgagcggcggaggggcaagggccacgacggcctgtaccagggcctgagcaccgccaccaaggatacctacgacgccctgcacatgcaggccctgccccccaga

SEQ ID NO: 595 - protein, 472 aa, Artificial Sequence
  Description of Artificial Sequence: Synthetic polypeptide
DIKMTQSPSSMYASLGERVTITCKASPDINSYLSWFQQKPGKSPKTLIYRANRLVDGVPSRFSGGGSGQDYSLTINSLEYEDMGIYYCLQYDEFPYTFGGGTKLEMKGSTSGSGKPGSGEGSTKGEVKLVESGGGLVKPGGSLKLSCAASGFTFSSYAMSWVRQIPEKRLEWVASISRGGTTYYPDSVKGRFTISRDNVRNILYLQMSSLRSEDTAMYYCGRYDYDGYYAMDYWGQGTSVTVSSKPTTTPAPRPPTPAPTIASQPLSLRPEACRPAAGGAVHTRGLDFACDIYIWAPLAGTCGVLLLSLVITLYCNHRNRSKRSRGGHSDYMNMTPRRPGPTRKHYQPYAPPRDFAAYRSRVKFSRSADAPAYQQGQNQLYNELNLGRREEYDVLDKRRGRDPEMGGKPRRKNPQEGLYNELQKDKMAEAYSEIGMKGERRRGKGHDGLYQGLSTATKDTYDALHMQALPPR

SEQ ID NO: 596 - DNA, 1416 bp, Artificial Sequence
  Description of Artificial Sequence: Synthetic polynucleotide
gacatcaagatgacccagagccccagctctatgtacgccagcctgggcgagcgcgtgaccatcacatgcaaggccagccccgacatcaacagctacctgtcctggttccagcagaagcccggcaagagccccaagaccctgatctaccgggccaaccggctggtggacggcgtgccaagcagattttccggcggaggcagcggccaggactacagcctgaccatcaacagcctggaatacgaggacatgggcatctactactgcctgcagtacgacgagttcccctacaccttcggaggcggcaccaagctggaaatgaagggcagcacctccggcagcggcaagcctggcagcggcgagggcagcaccaagggcgaagtgaagctggtggaaagcggcggaggcctggtgaaacctggcggcagcctgaagctgagctgcgccgccagcggcttcaccttcagcagctacgccatgagctgggtccgacagatccccgagaagcggctggaatgggtggccagcatcagcaggggcggcaccacctactaccccgacagcgtgaagggccggttcaccatcagccgggacaacgtgcggaacatcctgtacctgcagatgagcagcctgcggagcgaggacaccgccatgtactactgcggcagatacgactacgacggctactacgccatggattactggggccagggcaccagcgtgaccgtgtctagcaagcccaccaccacccctgcccctagacctccaaccccagcccctacaatcgccagccagcccctgagcctgaggcccgaagcctgtagacctgccgctggcggagccgtgcacaccagaggcctggatttcgcctgcgacatctacatctgggcccctctggccggcacctgtggcgtgctgctgctgagcctggtcatcaccctgtactgcaaccaccggaataggagcaagcggagcagaggcggccacagcgactacatgaacatgaccccccggaggcctggccccacccggaagcactaccagccctacgcccctcccagggacttcgccgcctaccggagccgggtgaagttcagccggagcgccgacgcccctgcctaccagcagggccagaaccagctgtacaacgagctgaacctgggccggagggaggagtacgacgtgctggacaagcggagaggccgggaccctgagatgggcggcaagccccggagaaagaaccctcaggagggcctgtataacgaactgcagaaagacaagatggccgaggcctacagcgagatcggcatgaagggcgagcggcggaggggcaagggccacgacggcctgtaccagggcctgagcaccgccaccaaggatacctacgacgccctgcacatgcaggccctgccccccaga

SEQ ID NO: 597 - protein, 519 aa, Artificial Sequence
  Description of Artificial Sequence: Synthetic polypeptide
DIKMTQSPSSMYASLGERVTITCKASPDINSYLSWFQQKPGKSPKTLIYRANRLVDGVPSRFSGGGSGQDYSLTINSLEYEDMGIYYCLQYDEFPYTFGGGTKLEMKGSTSGSGKPGSGEGSTKGEVKLVESGGGLVKPGGSLKLSCAASGFTFSSYAMSWVRQIPEKRLEWVASISRGGTTYYPDSVKGRFTISRDNVRNILYLQMSSLRSEDTAMYYCGRYDYDGYYAMDYWGQGTSVTVSSKPTTTPAPRPPTPAPTIASQPLSLRPEASRPAAGGAVHTRGLDFASDKPTTTPAPRPPTPAPTIASQPLSLRPEACRPAAGGAVHTRGLDFACDIYIWAPLAGTCGVLLLSLVITLYCNHRNRSKRSRGGHSDYMNMTPRRPGPTRKHYQPYAPPRDFAAYRSRVKFSRSADAPAYQQGQNQLYNELNLGRREEYDVLDKRRGRDPEMGGKPRRKNPQEGLYNELQKDKMAEAYSEIGMKGERRRGKGHDGLYQGLSTATKDTYDALHMQALPPR

SEQ ID NO: 598 - DNA, 1557 bp, Artificial Sequence
  Description of Artificial Sequence: Synthetic polynucleotide
gacatcaagatgacccagagccccagctctatgtacgccagcctgggcgagcgcgtgaccatcacatgcaaggccagccccgacatcaacagctacctgtcctggttccagcagaagcccggcaagagccccaagaccctgatctaccgggccaaccggctggtggacggcgtgccaagcagattttccggcggaggcagcggccaggactacagcctgaccatcaacagcctggaatacgaggacatgggcatctactactgcctgcagtacgacgagttcccctacaccttcggaggcggcaccaagctggaaatgaagggcagcacctccggcagcggcaagcctggcagcggcgagggcagcaccaagggcgaagtgaagctggtggaaagcggcggaggcctggtgaaacctggcggcagcctgaagctgagctgcgccgccagcggcttcaccttcagcagctacgccatgagctgggtccgacagatccccgagaagcggctggaatgggtggccagcatcagcaggggcggcaccacctactaccccgacagcgtgaagggccggttcaccatcagccgggacaacgtgcggaacatcctgtacctgcagatgagcagcctgcggagcgaggacaccgccatgtactactgcggcagatacgactacgacggctactacgccatggattactggggccagggcaccagcgtgaccgtgtctagcaaacctactacaactcctgccccccggcctcctacaccagctcctactatcgcctcccagccactcagtctcagacccgaggcttctaggccagcggccggaggcgcggtccacacccgcgggctggactttgcatccgataagcccaccaccacccctgcccctagacctccaaccccagcccctacaatcgccagccagcccctgagcctgaggcccgaagcctgtagacctgccgctggcggagccgtgcacaccagaggcctggatttcgcctgcgacatctacatctgggcccctctggccggcacctgtggcgtgctgctgctgagcctggtcatcaccctgtactgcaaccaccggaataggagcaagcggagcagaggcggccacagcgactacatgaacatgaccccccggaggcctggccccacccggaagcactaccagccctacgcccctcccagggacttcgccgcctaccggagccgggtgaagttcagccggagcgccgacgcccctgcctaccagcagggccagaaccagctgtacaacgagctgaacctgggccggagggaggagtacgacgtgctggacaagcggagaggccgggaccctgagatgggcggcaagccccggagaaagaaccctcaggagggcctgtataacgaactgcagaaagacaagatggccgaggcctacagcgagatcggcatgaagggcgagcggcggaggggcaagggccacgacggcctgtaccagggcctgagcaccgccaccaaggatacctacgacgccctgcacatgcaggccctgccccccaga

SEQ ID NO: 599 - protein, 566 aa, Artificial Sequence
  Description of Artificial Sequence: Synthetic polypeptide
DIKMTQSPSSMYASLGERVTITCKASPDINSYLSWFQQKPGKSPKTLIYRANRLVDGVPSRFSGGGSGQDYSLTINSLEYEDMGIYYCLQYDEFPYTFGGGTKLEMKGSTSGSGKPGSGEGSTKGEVKLVESGGGLVKPGGSLKLSCAASGFTFSSYAMSWVRQIPEKRLEWVASISRGGTTYYPDSVKGRFTISRDNVRNILYLQMSSLRSEDTAMYYCGRYDYDGYYAMDYWGQGTSVTVSSKPTTTPAPRPPTPAPTIASQPLSLRPEASRPAAGGAVHTRGLDFASDKPTTTPAPRPPTPAPTIASQPLSLRPEASRPAAGGAVHTRGLDFASDKPTTTPAPRPPTPAPTIASQPLSLRPEACRPAAGGAVHTRGLDFACDIYIWAPLAGTCGVLLLSLVITLYCNHRNRSKRSRGGHSDYMNMTPRRPGPTRKHYQPYAPPRDFAAYRSRVKFSRSADAPAYQQGQNQLYNELNLGRREEYDVLDKRRGRDPEMGGKPRRKNPQEGLYNELQKDKMAEAYSEIGMKGERRRGKGHDGLYQGLSTATKDTYDALHMQALPPR

SEQ ID NO: 600 - DNA, 1698 bp, Artificial Sequence
  Description of Artificial Sequence: Synthetic polynucleotide
gacatcaagatgacccagagccccagctctatgtacgccagcctgggcgagcgcgtgaccatcacatgcaaggccagccccgacatcaacagctacctgtcctggttccagcagaagcccggcaagagccccaagaccctgatctaccgggccaaccggctggtggacggcgtgccaagcagattttccggcggaggcagcggccaggactacagcctgaccatcaacagcctggaatacgaggacatgggcatctactactgcctgcagtacgacgagttcccctacaccttcggaggcggcaccaagctggaaatgaagggcagcacctccggcagcggcaagcctggcagcggcgagggcagcaccaagggcgaagtgaagctggtggaaagcggcggaggcctggtgaaacctggcggcagcctgaagctgagctgcgccgccagcggcttcaccttcagcagctacgccatgagctgggtccgacagatccccgagaagcggctggaatgggtggccagcatcagcaggggcggcaccacctactaccccgacagcgtgaagggccggttcaccatcagccgggacaacgtgcggaacatcctgtacctgcagatgagcagcctgcggagcgaggacaccgccatgtactactgcggcagatacgactacgacggctactacgccatggattactggggccagggcaccagcgtgaccgtgtctagcaagcctaccaccacccccgcacctcgtcctccaacccctgcacctacgattgccagtcagcctctttcactgcggcctgaggccagcagaccagctgccggcggtgccgtccatacaagaggactggacttcgcgtccgataaacctactaccactccagccccaaggcccccaaccccagcaccgactatcgcatcacagcctttgtcactgcgtcctgaagccagccggccagctgcagggggggccgtccacacaaggggactcgactttgcgagtgataagcccaccaccacccctgcccctagacctccaaccccagcccctacaatcgccagccagcccctgagcctgaggcccgaagcctgtagacctgccgctggcggagccgtgcacaccagaggcctggatttcgcctgcgacatctacatctgggcccctctggccggcacctgtggcgtgctgctgctgagcctggtcatcaccctgtactgcaaccaccggaataggagcaagcggagcagaggcggccacagcgactacatgaacatgaccccccggaggcctggccccacccggaagcactaccagccctacgcccctcccagggacttcgccgcctaccggagccgggtgaagttcagccggagcgccgacgcccctgcctaccagcagggccagaaccagctgtacaacgagctgaacctgggccggagggaggagtacgacgtgctggacaagcggagaggccgggaccctgagatgggcggcaagccccggagaaagaaccctcaggagggcctgtataacgaactgcagaaagacaagatggccgaggcctacagcgagatcggcatgaagggcgagcggcggaggggcaagggccacgacggcctgtaccagggcctgagcaccgccaccaaggatacctacgacgccctgcacatgcaggccctgccccccaga

SEQ ID NO: 601 - protein, 613 aa, Artificial Sequence
  Description of Artificial Sequence: Synthetic polypeptide
DIKMTQSPSSMYASLGERVTITCKASPDINSYLSWFQQKPGKSPKTLIYRANRLVDGVPSRFSGGGSGQDYSLTINSLEYEDMGIYYCLQYDEFPYTFGGGTKLEMKGSTSGSGKPGSGEGSTKGEVKLVESGGGLVKPGGSLKLSCAASGFTFSSYAMSWVRQIPEKRLEWVASISRGGTTYYPDSVKGRFTISRDNVRNILYLQMSSLRSEDTAMYYCGRYDYDGYYAMDYWGQGTSVTVSSKPTTTPAPRPPTPAPTIASQPLSLRPEASRPAAGGAVHTRGLDFASDKPTTTPAPRPPTPAPTIASQPLSLRPEASRPAAGGAVHTRGLDFASDKPTTTPAPRPPTPAPTIASQPLSLRPEASRPAAGGAVHTRGLDFASDKPTTTPAPRPPTPAPTIASQPLSLRPEACRPAAGGAVHTRGLDFACDIYIWAPLAGTCGVLLLSLVITLYCNHRNRSKRSRGGHSDYMNMTPRRPGPTRKHYQPYAPPRDFAAYRSRVKFSRSADAPAYQQGQNQLYNELNLGRREEYDVLDKRRGRDPEMGGKPRRKNPQEGLYNELQKDKMAEAYSEIGMKGERRRGKGHDGLYQGLSTATKDTYDALHMQALPPR

SEQ ID NO: 602 - DNA, 1839 bp, Artificial Sequence
  Description of Artificial Sequence: Synthetic polynucleotide
gacatcaagatgacccagagccccagctctatgtacgccagcctgggcgagcgcgtgaccatcacatgcaaggccagccccgacatcaacagctacctgtcctggttccagcagaagcccggcaagagccccaagaccctgatctaccgggccaaccggctggtggacggcgtgccaagcagattttccggcggaggcagcggccaggactacagcctgaccatcaacagcctggaatacgaggacatgggcatctactactgcctgcagtacgacgagttcccctacaccttcggaggcggcaccaagctggaaatgaagggcagcacctccggcagcggcaagcctggcagcggcgagggcagcaccaagggcgaagtgaagctggtggaaagcggcggaggcctggtgaaacctggcggcagcctgaagctgagctgcgccgccagcggcttcaccttcagcagctacgccatgagctgggtccgacagatccccgagaagcggctggaatgggtggccagcatcagcaggggcggcaccacctactaccccgacagcgtgaagggccggttcaccatcagccgggacaacgtgcggaacatcctgtacctgcagatgagcagcctgcggagcgaggacaccgccatgtactactgcggcagatacgactacgacggctactacgccatggattactggggccagggcaccagcgtgaccgtgtctagcaagcctaccaccacccccgcacctcgtcctccaacccctgcacctacgattgccagtcagcctctttcactgcggcctgaggccagcagaccagctgccggcggtgccgtccatacaagaggactggacttcgcgtccgataaacctactaccactccagccccaaggcccccaaccccagcaccgactatcgcatcacagcctttgtcactgcgtcctgaagccagccggccagctgcagggggggccgtccacacaaggggactcgactttgcgagtgataaacctactacaactcctgccccccggcctcctacaccagctcctactatcgcctcccagccactcagtctcagacccgaggcttctaggccagcggccggaggcgcggtccacacccgcgggctggactttgcatccgataagcccaccaccacccctgcccctagacctccaaccccagcccctacaatcgccagccagcccctgagcctgaggcccgaagcctgtagacctgccgctggcggagccgtgcacaccagaggcctggatttcgcctgcgacatctacatctgggcccctctggccggcacctgtggcgtgctgctgctgagcctggtcatcaccctgtactgcaaccaccggaataggagcaagcggagcagaggcggccacagcgactacatgaacatgaccccccggaggcctggccccacccggaagcactaccagccctacgcccctcccagggacttcgccgcctaccggagccgggtgaagttcagccggagcgccgacgcccctgcctaccagcagggccagaaccagctgtacaacgagctgaacctgggccggagggaggagtacgacgtgctggacaagcggagaggccgggaccctgagatgggcggcaagccccggagaaagaaccctcaggagggcctgtataacgaactgcagaaagacaagatggccgaggcctacagcgagatcggcatgaagggcgagcggcggaggggcaagggccacgacggcctgtaccagggcctgagcaccgccaccaaggatacctacgacgccctgcacatgcaggccctgccccccaga

SEQ ID NO: 603 - protein, 647 aa, Artificial Sequence
  Description of Artificial Sequence: Synthetic polypeptide
DIKMTQSPSSMYASLGERVTITCKASPDINSYLSWFQQKPGKSPKTLIYRANRLVDGVPSRFSGGGSGQDYSLTINSLEYEDMGIYYCLQYDEFPYTFGGGTKLEMKGSTSGSGKPGSGEGSTKGEVKLVESGGGLVKPGGSLKLSCAASGFTFSSYAMSWVRQIPEKRLEWVASISRGGTTYYPDSVKGRFTISRDNVRNILYLQMSSLRSEDTAMYYCGRYDYDGYYAMDYWGQGTSVTVSSKEACPTGLYTHSGECCKACNLGEGVAQPCGANQTVCEPCLDSVTFSDVVSATEPCKPCTECVGLQSMSAPCVEADDAVCRCAYGYYQDETTGRCEACRVCEAGSGLVFSCQDKQNTVCEECPDGTYSDEANHVDPCLPCTVCEDTERQLRECTRWADAECEEIPGRWITRSTPPEGSDSTAPSTQEPEAPPEQDLIASTVAGVVTTVMGSSQPVVTRGTTDNIYIWAPLAGTCGVLLLSLVITLYCNHRNRSKRSRGGHSDYMNMTPRRPGPTRKHYQPYAPPRDFAAYRSRVKFSRSADAPAYQQGQNQLYNELNLGRREEYDVLDKRRGRDPEMGGKPRRKNPQEGLYNELQKDKMAEAYSEIGMKGERRRGKGHDGLYQGLSTATKDTYDALHMQALPPR

SEQ ID NO: 604 - DNA, 1941 bp, Artificial Sequence
  Description of Artificial Sequence: Synthetic polynucleotide
gacatcaagatgacccagagccccagctctatgtacgccagcctgggcgagcgcgtgaccatcacatgcaaggccagccccgacatcaacagctacctgtcctggttccagcagaagcccggcaagagccccaagaccctgatctaccgggccaaccggctggtggacggcgtgccaagcagattttccggcggaggcagcggccaggactacagcctgaccatcaacagcctggaatacgaggacatgggcatctactactgcctgcagtacgacgagttcccctacaccttcggaggcggcaccaagctggaaatgaagggcagcacctccggcagcggcaagcctggcagcggcgagggcagcaccaagggcgaagtgaagctggtggaaagcggcggaggcctggtgaaacctggcggcagcctgaagctgagctgcgccgccagcggcttcaccttcagcagctacgccatgagctgggtccgacagatccccgagaagcggctggaatgggtggccagcatcagcaggggcggcaccacctactaccccgacagcgtgaagggccggttcaccatcagccgggacaacgtgcggaacatcctgtacctgcagatgagcagcctgcggagcgaggacaccgccatgtactactgcggcagatacgactacgacggctactacgccatggattactggggccagggcaccagcgtgaccgtgtctagcaaggaggcatgccccacaggcctgtacacacacagcggtgagtgctgcaaagcctgcaacctgggcgagggtgtggcccagccttgtggagccaaccagaccgtgtgtgagccctgcctggacagcgtgacgttctccgacgtggtgagcgcgaccgagccgtgcaagccgtgcaccgagtgcgtggggctccagagcatgtcggcgccgtgcgtggaggccgacgacgccgtgtgccgctgcgcctacggctactaccaggatgagacgactgggcgctgcgaggcgtgccgcgtgtgcgaggcgggctcgggcctcgtgttctcctgccaggacaagcagaacaccgtgtgcgaggagtgccccgacggcacgtattccgacgaggccaaccacgtggacccgtgcctgccctgcaccgtgtgcgaggacaccgagcgccagctccgcgagtgcacacgctgggccgacgccgagtgcgaggagatccctggccgttggattacacggtccacacccccagagggctcggacagcacagcccccagcacccaggagcctgaggcacctccagaacaagacctcatagccagcacggtggcaggtgtggtgaccacagtgatgggcagctcccagcccgtggtgacccgaggcaccaccgacaacatctacatctgggcccctctggccggcacctgtggcgtgctgctgctgagcctggtcatcaccctgtactgcaaccaccggaataggagcaagcggagcagaggcggccacagcgactacatgaacatgaccccccggaggcctggccccacccggaagcactaccagccctacgcccctcccagggacttcgccgcctaccggagccgggtgaagttcagccggagcgccgacgcccctgcctaccagcagggccagaaccagctgtacaacgagctgaacctgggccggagggaggagtacgacgtgctggacaagcggagaggccgggaccctgagatgggcggcaagccccggagaaagaaccctcaggagggcctgtataacgaactgcagaaagacaagatggccgaggcctacagcgagatcggcatgaagggcgagcggcggaggggcaagggccacgacggcctgtaccagggcctgagcaccgccaccaaggatacctacgacgccctgcacatgcaggccctgccccccaga

SEQ ID NO: 605 - protein, 567 aa, Artificial Sequence
  Description of Artificial Sequence: Synthetic polypeptide
EVKLVESGGGLVKPGGSLKLSCAASGFTFSSYAMSWVRQIPEKRLEWVASISRGGTTYYPDSVKGRFTISRDNVRNILYLQMSSLRSEDTAMYYCGRYDYDGYYAMDYWGQGTSVTVSSGSTSGSGKPGSGEGSTKGDIKMTQSPSSMYASLGERVTITCKASPDINSYLSWFQQKPGKSPKTLIYRANRLVDGVPSRFSGGGSGQDYSLTINSLEYEDMGIYYCLQYDEFPYTFGGGTKLEMKKPTTTPAPRPPTPAPTIASQPLSLRPEASRPAAGGAVHTRGLDFASDKPTTTPAPRPPTPAPTIASQPLSLRPEASRPAAGGAVHTRGLDFASDKPTTTPAPRPPTPAPTIASQPLSLRPEACRPAAGGAVHTRGLDFACDIYIWAPLAGTCGVLLLSLVITLYCNHRNKRGRKKLLYIFKQPFMRPVQTTQEEDGCSCRFPEEEEGGCELRVKFSRSADAPAYQQGQNQLYNELNLGRREEYDVLDKRRGRDPEMGGKPRRKNPQEGLYNELQKDKMAEAYSEIGMKGERRRGKGHDGLYQGLSTATKDTYDALHMQALPPR

SEQ ID NO: 606 - DNA, 1701 bp, Artificial Sequence
  Description of Artificial Sequence: Synthetic polynucleotide
gaagtgaagctggtggaaagcggcggaggcctggtgaaacctggcggcagcctgaagctgagctgcgccgccagcggcttcaccttcagcagctacgccatgagctgggtccgacagatccccgagaagcggctggaatgggtggccagcatcagcaggggcggcaccacctactaccccgacagcgtgaagggccggttcaccatcagccgggacaacgtgcggaacatcctgtacctgcagatgagcagcctgcggagcgaggacaccgccatgtactactgcggcagatacgactacgacggctactacgccatggattactggggccagggcaccagcgtgaccgtgtctagcggcagcacctccggcagcggcaagcctggcagcggcgagggcagcaccaagggcgacatcaagatgacccagagccccagctctatgtacgccagcctgggcgagcgcgtgaccatcacatgcaaggccagccccgacatcaacagctacctgtcctggttccagcagaagcccggcaagagccccaagaccctgatctaccgggccaaccggctggtggacggcgtgccaagcagattttccggcggaggcagcggccaggactacagcctgaccatcaacagcctggaatacgaggacatgggcatctactactgcctgcagtacgacgagttcccctacaccttcggaggcggcaccaagctggaaatgaagaagcctaccaccacccccgcacctcgtcctccaacccctgcacctacgattgccagtcagcctctttcactgcggcctgaggccagcagaccagctgccggcggtgccgtccatacaagaggactggacttcgcgtccgataaacctactaccactccagccccaaggcccccaaccccagcaccgactatcgcatcacagcctttgtcactgcgtcctgaagccagccggccagctgcagggggggccgtccacacaaggggactcgactttgcgagtgataagcccaccaccacccctgcccctagacctccaaccccagcccctacaatcgccagccagcccctgagcctgaggcccgaagcctgtagacctgccgctggcggagccgtgcacaccagaggcctggatttcgcctgcgacatctacatctgggcccctctggccggcacctgtggcgtgctgctgctgagcctggtcatcaccctgtactgcaaccaccggaataagagaggccggaagaaactgctgtacatcttcaagcagcccttcatgcggcccgtgcagaccacccaggaagaggacggctgcagctgccggttccccgaggaagaggaaggcggctgcgaactgcgggtgaagttcagccggagcgccgacgcccctgcctaccagcagggccagaaccagctgtacaacgagctgaacctgggccggagggaggagtacgacgtgctggacaagcggagaggccgggaccctgagatgggcggcaagccccggagaaagaaccctcaggagggcctgtataacgaactgcagaaagacaagatggccgaggcctacagcgagatcggcatgaagggcgagcggcggaggggcaagggccacgacggcctgtaccagggcctgagcaccgccaccaaggatacctacgacgccctgcacatgcaggccctgccccccaga

SEQ ID NO: 607 - protein, 656 aa, Artificial Sequence
  Description of Artificial Sequence: Synthetic polypeptide
EVKLVESGGGLVKPGGSLKLSCAASGFTFSSYAMSWVRQIPEKRLEWVASISRGGTTYYPDSVKGRFTISRDNVRNILYLQMSSLRSEDTAMYYCGRYDYDGYYAMDYWGQGTSVTVSSGSTSGSGKPGSGEGSTKGDIKMTQSPSSMYASLGERVTITCKASPDINSYLSWFQQKPGKSPKTLIYRANRLVDGVPSRFSGGGSGQDYSLTINSLEYEDMGIYYCLQYDEFPYTFGGGTKLEMKESKYGPPCPPCPAPEFEGGPSVFLFPPKPKDTLMISRTPEVTCVVVDVSQEDPEVQFNWYVDGVEVHNAKTKPREEQFQSTYRVVSVLTVLHQDWLNGKEYKCKVSNKGLPSSIEKTISKAKGQPREPQVYTLPPSQEEMTKNQVSLTCLVKGFYPSDIAVEWESNGQPENNYKTTPPVLDSDGSFFLYSRLTVDKSRWQEGNVFSCSVMHEALHNHYTQKSLSLSLGKMIYIWAPLAGTCGVLLLSLVITLYCNHRNKRGRKKLLYIFKQPFMRPVQTTQEEDGCSCRFPEEEEGGCELRVKFSRSADAPAYQQGQNQLYNELNLGRREEYDVLDKRRGRDPEMGGKPRRKNPQEGLYNELQKDKMAEAYSEIGMKGERRRGKGHDGLYQGLSTATKDTYDALHMQALPPR

SEQ ID NO: 608 - DNA, 1968 bp, Artificial Sequence
  Description of Artificial Sequence: Synthetic polynucleotide
gaagtgaagctggtggaaagcggcggaggcctggtgaaacctggcggcagcctgaagctgagctgcgccgccagcggcttcaccttcagcagctacgccatgagctgggtccgacagatccccgagaagcggctggaatgggtggccagcatcagcaggggcggcaccacctactaccccgacagcgtgaagggccggttcaccatcagccgggacaacgtgcggaacatcctgtacctgcagatgagcagcctgcggagcgaggacaccgccatgtactactgcggcagatacgactacgacggctactacgccatggattactggggccagggcaccagcgtgaccgtgtctagcggcagcacctccggcagcggcaagcctggcagcggcgagggcagcaccaagggcgacatcaagatgacccagagccccagctctatgtacgccagcctgggcgagcgcgtgaccatcacatgcaaggccagccccgacatcaacagctacctgtcctggttccagcagaagcccggcaagagccccaagaccctgatctaccgggccaaccggctggtggacggcgtgccaagcagattttccggcggaggcagcggccaggactacagcctgaccatcaacagcctggaatacgaggacatgggcatctactactgcctgcagtacgacgagttcccctacaccttcggaggcggcaccaagctggaaatgaaggagagcaagtacggccctccctgccccccttgccctgcccccgagttcgagggcggacccagcgtgttcctgttcccccccaagcccaaggacaccctgatgatcagccggacccccgaggtgacctgtgtggtggtggacgtgtcccaggaggaccccgaggtccagttcaactggtacgtggacggcgtggaggtgcacaacgccaagaccaagccccgggaggagcagttccagagcacctaccgggtggtgtccgtgctgaccgtgctgcaccaggactggctgaacggcaaggaatacaagtgtaaggtgtccaacaagggcctgcccagcagcatcgagaaaaccatcagcaaggccaagggccagcctcgggagccccaggtgtacaccctgccccctagccaagaggagatgaccaagaatcaggtgtccctgacctgcctggtgaagggcttctaccccagcgacatcgccgtggagtgggagagcaacggccagcccgagaacaactacaagaccaccccccctgtgctggacagcgacggcagcttcttcctgtacagcaggctgaccgtggacaagagccggtggcaggagggcaacgtctttagctgctccgtgatgcacgaggccctgcacaaccactacacccagaagagcctgtccctgagcctgggcaagatgatctacatctgggcccctctggccggcacctgtggcgtgctgctgctgagcctggtcatcaccctgtactgcaaccaccggaataagagaggccggaagaaactgctgtacatcttcaagcagcccttcatgcggcccgtgcagaccacccaggaagaggacggctgcagctgccggttccccgaggaagaggaaggcggctgcgaactgcgggtgaagttcagccggagcgccgacgcccctgcctaccagcagggccagaaccagctgtacaacgagctgaacctgggccggagggaggagtacgacgtgctggacaagcggagaggccgggaccctgagatgggcggcaagccccggagaaagaaccctcaggagggcctgtataacgaactgcagaaagacaagatggccgaggcctacagcgagatcggcatgaagggcgagcggcggaggggcaagggccacgacggcctgtaccagggcctgagcaccgccaccaaggatacctacgacgccctgcacatgcaggccctgccccccaga

SEQ ID NO: 609 - protein, 107 aa, Artificial Sequence
  Description of Artificial Sequence: Synthetic polypeptide
DVQITQSPSSLYASLGERVTITCKASPDINSYLSWFQQKPGKSPKTLIYRANRLVDGVPSRFSGGGSGQDYSLTINSLEYEDMGIYYCLQYDEFPYTFGGGTKLEMK

SEQ ID NO: 610 - DNA, 321 bp, Artificial Sequence
  Description of Artificial Sequence: Synthetic polynucleotide
gacgtgcagatcacccagagccccagcagcctgtatgccagcctgggcgagagagtgaccattacctgcaaggccagccccgacatcaacagctacctgagctggttccagcagaagcccggcaagagccccaagaccctgatctaccgggccaacagactggtggatggcgtgcccagcagattcagcggcggaggctctggccaggactacagcctgaccatcaactccctggaatacgaggacatgggcatctactactgcctgcagtacgacgagttcccctacaccttcggaggcggcaccaagctggaaatgaag

SEQ ID NO: 611 - protein, 119 aa, Artificial Sequence
  Description of Artificial Sequence: Synthetic polypeptide
EVKLVESGGGLVKPGGSLKLSCAASGFTFSSYAMSWVRQIPEKRLEWVASISRGGTTYYPDSVKGRFTISRDNVRNILYLQMSSLRSEDTAMYYCGRYDYDGYYAMDYWGQGTSVTVSS

SEQ ID NO: 612 - DNA, 357 bp, Artificial Sequence
  Description of Artificial Sequence: Synthetic polynucleotide
gaagtgaagctggtggaatctggcggcggactcgtgaagcctggcggctctctgaagctgtcttgtgccgccagcggcttcaccttcagcagctacgccatgagctgggtgcggcagatccccgagaagcggctggaatgggtggccagcatcagcagaggcggaaccacctactaccccgactctgtgaagggccggttcaccatcagccgggacaacgtgcggaacatcctgtacctgcagatgagcagcctgcggagcgaggacaccgccatgtactactgtggcagatacgactacgacggctactatgccatggattactggggccagggcaccagcgtgaccgtgtcatct

SEQ ID NO: 613 - protein, 566 aa, Artificial Sequence
  Description of Artificial Sequence: Synthetic polypeptide
DVQITQSPSSLYASLGERVTITCKASPDINSYLSWFQQKPGKSPKTLIYRANRLVDGVPSRFSGGGSGQDYSLTINSLEYEDMGIYYCLQYDEFPYTFGGGTKLEMKGSTSGSGKPGSGEGSTKGEVKLVESGGGLVKPGGSLKLSCAASGFTFSSYAMSWVRQIPEKRLEWVASISRGGTTYYPDSVKGRFTISRDNVRNILYLQMSSLRSEDTAMYYCGRYDYDGYYAMDYWGQGTSVTVSSKPTTTPAPRPPTPAPTIASQPLSLRPEASRPAAGGAVHTRGLDFASDKPTTTPAPRPPTPAPTIASQPLSLRPEASRPAAGGAVHTRGLDFASDKPTTTPAPRPPTPAPTIASQPLSLRPEACRPAAGGAVHTRGLDFACDIYIWAPLAGTCGVLLLSLVITLYCNHRNRSKRSRGGHSDYMNMTPRRPGPTRKHYQPYAPPRDFAAYRSRVKFSRSADAPAYQQGQNQLYNELNLGRREEYDVLDKRRGRDPEMGGKPRRKNPQEGLYNELQKDKMAEAYSEIGMKGERRRGKGHDGLYQGLSTATKDTYDALHMQALPPR

SEQ ID NO: 614 - DNA, 1698 bp, Artificial Sequence
  Description of Artificial Sequence: Synthetic polynucleotide
gacgtgcagatcacccagagccccagcagcctgtatgccagcctgggcgagagagtgaccattacctgcaaggccagccccgacatcaacagctacctgagctggttccagcagaagcccggcaagagccccaagaccctgatctaccgggccaacagactggtggatggcgtgcccagcagattcagcggcggaggctctggccaggactacagcctgaccatcaactccctggaatacgaggacatgggcatctactactgcctgcagtacgacgagttcccctacaccttcggaggcggcaccaagctggaaatgaagggcagcacaagcggcagcggcaagcctggatctggcgagggaagcaccaagggcgaagtgaagctggtggaatctggcggcggactcgtgaagcctggcggctctctgaagctgtcttgtgccgccagcggcttcaccttcagcagctacgccatgagctgggtgcggcagatccccgagaagcggctggaatgggtggccagcatcagcagaggcggaaccacctactaccccgactctgtgaagggccggttcaccatcagccgggacaacgtgcggaacatcctgtacctgcagatgagcagcctgcggagcgaggacaccgccatgtactactgtggcagatacgactacgacggctactatgccatggattactggggccagggcaccagcgtgaccgtgtcatctaagcctaccaccacccccgcacctcgtcctccaacccctgcacctacgattgccagtcagcctctttcactgcggcctgaggccagcagaccagctgccggcggtgccgtccatacaagaggactggacttcgcgtccgataaacctactaccactccagccccaaggcccccaaccccagcaccgactatcgcatcacagcctttgtcactgcgtcctgaagccagccggccagctgcagggggggccgtccacacaaggggactcgactttgcgagtgataagcccaccaccacccctgcccctagacctccaaccccagcccctacaatcgccagccagcccctgagcctgaggcccgaagcctgtagacctgccgctggcggagccgtgcacaccagaggcctggatttcgcctgcgacatctacatctgggcccctctggccggcacctgtggcgtgctgctgctgagcctggtcatcaccctgtactgcaaccaccggaataggagcaagcggagcagaggcggccacagcgactacatgaacatgaccccccggaggcctggccccacccggaagcactaccagccctacgcccctcccagggacttcgccgcctaccggagccgggtgaagttcagccggagcgccgacgcccctgcctaccagcagggccagaaccagctgtacaacgagctgaacctgggccggagggaggagtacgacgtgctggacaagcggagaggccgggaccctgagatgggcggcaagccccggagaaagaaccctcaggagggcctgtataacgaactgcagaaagacaagatggccgaggcctacagcgagatcggcatgaagggcgagcggcggaggggcaagggccacgacggcctgtaccagggcctgagcaccgccaccaaggatacctacgacgccctgcacatgcaggccctgccccccaga

SEQ ID NO: 615 - protein, 563 aa, Artificial Sequence
  Description of Artificial Sequence: Synthetic polypeptide
EVQLVESGGGLVQPGGSLRLSCATSGFTFSSYAMSWMRQAPGKGLEWVASISRGGTTYYADSVKGRFTISVDKSKNTLYLQMNSLRAEDTAVYYCGRYDYDGYYAMDYWGQGTLVTVSSGGGGSGGGGSGGGGSDIQMTQSPSSLSASVGDRVTITCKASPDINSYLNWYQQKPGKAPKLLIYRANRLVDGVPSRFSGSGSGTDYTLTISSLQPEDFATYYCLQYDEFPYTFGAGTKVEIKKPTTTPAPRPPTPAPTIASQPLSLRPEASRPAAGGAVHTRGLDFASDKPTTTPAPRPPTPAPTIASQPLSLRPEASRPAAGGAVHTRGLDFASDKPTTTPAPRPPTPAPTIASQPLSLRPEACRPAAGGAVHTRGLDFACDIYIWAPLAGTCGVLLLSLVITLYCNHRNRSKRSRGGHSDYMNMTPRRPGPTRKHYQPYAPPRDFAAYRSRVKFSRSADAPAYQQGQNQLYNELNLGRREEYDVLDKRRGRDPEMGGKPRRKNPQEGLYNELQKDKMAEAYSEIGMKGERRRGKGHDGLYQGLSTATKDTYDALHMQALPPR

SEQ ID NO: 616 - DNA, 1689 bp, Artificial Sequence
  Description of Artificial Sequence: Synthetic polynucleotide
gaagtgcagctggtggagtctggcggcggtctggtgcagcccggcggctctctgcgcctctcctgtgccacctctggttttacattctcctcctacgctatgtcctggatgcggcaagcccccggcaagggcctagagtgggtcgcctcaatcagcaggggcgggacgacttattatgccgattcagttaaggggagattcacaatttccgtggataaatccaagaataccttatacctccagatgaactctctgcgggccgaagatacggccgtatattattgtgggaggtatgactacgacggatattacgccatggattattgggggcaggggacacttgttacagtgagttccggtggtggggggtctggaggcgggggcagtggaggcggagggtctgatatacagatgacacagagcccttcaagtttatctgcaagcgtcggcgatcgtgttacaataacttgcaaggcatctcccgacatcaattcctacctcaactggtatcagcagaagcctgggaaggctcctaagctgcttatttacagagcaaatcgcctggtggacggcgtgcccagtcggttttccgggtctgggagcggaacggattacacactgaccatctcaagcctgcaacccgaagacttcgctacatattactgccttcagtatgatgagttcccatataccttcggcgctgggaccaaggtggagataaagaagcctaccaccacccccgcacctcgtcctccaacccctgcacctacgattgccagtcagcctctttcactgcggcctgaggccagcagaccagctgccggcggtgccgtccatacaagaggactggacttcgcgtccgataaacctactaccactccagccccaaggcccccaaccccagcaccgactatcgcatcacagcctttgtcactgcgtcctgaagccagccggccagctgcagggggggccgtccacacaaggggactcgactttgcgagtgataagcccaccaccacccctgcccctagacctccaaccccagcccctacaatcgccagccagcccctgagcctgaggcccgaagcctgtagacctgccgctggcggagccgtgcacaccagaggcctggatttcgcctgcgacatctacatctgggcccctctggccggcacctgtggcgtgctgctgctgagcctggtcatcaccctgtactgcaaccaccggaataggagcaagcggagcagaggcggccacagcgactacatgaacatgaccccccggaggcctggccccacccggaagcactaccagccctacgcccctcccagggacttcgccgcctaccggagccgggtgaagttcagccggagcgccgacgcccctgcctaccagcagggccagaaccagctgtacaacgagctgaacctgggccggagggaggagtacgacgtgctggacaagcggagaggccgggaccctgagatgggcggcaagccccggagaaagaaccctcaggagggcctgtataacgaactgcagaaagacaagatggccgaggcctacagcgagatcggcatgaagggcgagcggcggaggggcaagggccacgacggcctgtaccagggcctgagcaccgccaccaaggatacctacgacgccctgcacatgcaggccctgccccccaga

SEQ ID NO: 617 - protein, 563 aa, Artificial Sequence
  Description of Artificial Sequence: Synthetic polypeptide
DIQMTQSPSSLSASVGDRVTITCKASPDINSYLSWYQQKPGKAPKLLIYRANRLVDGVPSRFSGSGSGTDFTLTISSLQPEDIATYYCLQYDEFPYTFGQGTKLEIKGGGGSGGGGSGGGGSEVQLVESGGGLVQPGGSLRLSCAASGFTFSSYAMSWVRQAPGKGLEWVSSISRGGTTYYPDSVKGRFTISRDNSKNTLYLQMNSLRAEDTAVYYCGRYDYDGYYAMDYWGQGTLVTVSSKPTTTPAPRPPTPAPTIASQPLSLRPEASRPAAGGAVHTRGLDFASDKPTTTPAPRPPTPAPTIASQPLSLRPEASRPAAGGAVHTRGLDFASDKPTTTPAPRPPTPAPTIASQPLSLRPEACRPAAGGAVHTRGLDFACDIYIWAPLAGTCGVLLLSLVITLYCNHRNRSKRSRGGHSDYMNMTPRRPGPTRKHYQPYAPPRDFAAYRSRVKFSRSADAPAYQQGQNQLYNELNLGRREEYDVLDKRRGRDPEMGGKPRRKNPQEGLYNELQKDKMAEAYSEIGMKGERRRGKGHDGLYQGLSTATKDTYDALHMQALPPR

SEQ ID NO: 618 - DNA, 1692 bp, Artificial Sequence
  Description of Artificial Sequence: Synthetic polynucleotide
gatattcagatgacccagtcaccttcgagtctgagcgcatccgtgggcgacagagtgaccattacctgtaaggccagcccggacattaacagctacctatcgtggtatcagcaaaagcctggtaaggcccctaaactccttatctacagggctaataggttggtagacggggtgcctagccggttctctggttccggcagcggtacggactttactctgaccataagctctctgcaaccagaagacatcgcaacatactactgtttacaatacgacgaatttccttatacctttggccaggggaccaagttagagatcaaggggggcggcggaagtggtggagggggaagtggtggaggaggaagcgaagtgcaactggtcgagtctgggggcggccttgtgcaacctggaggcagccttcgactcagttgcgccgcgtctggttttaccttctcctcttacgcgatgagctgggttcgccaggcccccggcaagggacttgagtgggttagttcgatctcccgcggaggcaccacatattatcctgactcggttaagggacgcttcactatctctagggacaattcaaagaacacactgtatctccaaatgaactccttgcgggccgaggacactgctgtgtattattgcggacgatacgactacgatgggtattacgccatggattactgggggcaaggtacactggtcactgtgagttcgaagcctaccaccacccccgcacctcgtcctccaacccctgcacctacgattgccagtcagcctctttcactgcggcctgaggccagcagaccagctgccggcggtgccgtccatacaagaggactggacttcgcgtccgataaacctactaccactccagccccaaggcccccaaccccagcaccgactatcgcatcacagcctttgtcactgcgtcctgaagccagccggccagctgcagggggggccgtccacacaaggggactcgactttgcgagtgataagcccaccaccacccctgcccctagacctccaaccccagcccctacaatcgccagccagcccctgagcctgaggcccgaagcctgtagacctgccgctggcggagccgtgcacaccagaggcctggatttcgcctgcgacatctacatctgggcccctctggccggcacctgtggcgtgctgctgctgagcctggtcatcaccctgtactgcaaccaccggaataggagcaagcggagcagaggcggccacagcgactacatgaacatgaccccccggaggcctggccccacccggaagcactaccagccctacgcccctcccagggacttcgccgcctaccggagccgggtgaagttcagccggagcgccgacgcccctgcctaccagcagggccagaaccagctgtacaacgagctgaacctgggccggagggaggagtacgacgtgctggacaagcggagaggccgggaccctgagatgggcggcaagccccggagaaagaaccctcaggagggcctgtataacgaactgcagaaagacaagatggccgaggcctacagcgagatcggcatgaagggcgagcggcggaggggcaagggccacgacggcctgtaccagggcctgagcaccgccaccaaggatacctacgacgccctgcacatgcaggccctgccccccagatga

SEQ ID NO: 619 - protein, 563 aa, Artificial Sequence
  Description of Artificial Sequence: Synthetic polypeptide
EVQLVESGGGLVQPGGSLRLSCAASGFTFSSYAMSWVRQAPGKGLEWVASISRGGTTYYADSVKGRFTISRDNSKNTLYLQMNSLRAEDTAVYYCGRYDYDGYYAMDYWGQGTLVTVSSGGGGSGGGGSGGGGSDIQMTQSPSSLSASVGDRVTITCKASPDINSYLNWYQQKPGKAPKLLIYRANRLVDGVPSRFSGSGSGTDFTLTISSLQPEDIATYYCLQYDEFPYTFGGGTKVEIKKPTTTPAPRPPTPAPTIASQPLSLRPEASRPAAGGAVHTRGLDFASDKPTTTPAPRPPTPAPTIASQPLSLRPEASRPAAGGAVHTRGLDFASDKPTTTPAPRPPTPAPTIASQPLSLRPEACRPAAGGAVHTRGLDFACDIYIWAPLAGTCGVLLLSLVITLYCNHRNRSKRSRGGHSDYMNMTPRRPGPTRKHYQPYAPPRDFAAYRSRVKFSRSADAPAYQQGQNQLYNELNLGRREEYDVLDKRRGRDPEMGGKPRRKNPQEGLYNELQKDKMAEAYSEIGMKGERRRGKGHDGLYQGLSTATKDTYDALHMQALPPR

SEQ ID NO: 620 - DNA, 1689 bp, Artificial Sequence
  Description of Artificial Sequence: Synthetic polynucleotide
gaggttcaacttgtggaatccggcggcgggttagtccagcccggcgggagcttgcggctgtcctgcgccgcctctggattcacttttagctcctatgctatgtcttgggtaaggcaggcccctggtaaaggactagagtgggtggcctcgatctcccgtggtggcactacatactacgccgactccgttaaaggccggtttaccatctcccgtgacaactctaaaaatactttgtacctgcaaatgaactccctgcgggcagaagacacagccgtgtactattgcgggcgttacgattacgacggatattacgcaatggactactggggccagggcacactggtcaccgtgagcagcgggggcggaggaagtggaggaggcggtagtggtgggggaggaagcgatatacaaatgactcagtcccctagtagccttagtgctagtgtgggagacagagtgaccatcacctgcaaagcatctcctgatatcaattcctaccttaactggtatcaacagaagcctggcaaagctccaaagctcctgatttatcgcgcgaacagattggtcgatggggtcccttccagattcagcggctcagggtcagggaccgatttcaccctcacaattagttcacttcagcccgaggacatcgccacgtattattgccttcagtacgatgagttcccttacacctttggcgggggaactaaagtcgaaattaagaagcctaccaccacccccgcacctcgtcctccaacccctgcacctacgattgccagtcagcctctttcactgcggcctgaggccagcagaccagctgccggcggtgccgtccatacaagaggactggacttcgcgtccgataaacctactaccactccagccccaaggcccccaaccccagcaccgactatcgcatcacagcctttgtcactgcgtcctgaagccagccggccagctgcagggggggccgtccacacaaggggactcgactttgcgagtgataagcccaccaccacccctgcccctagacctccaaccccagcccctacaatcgccagccagcccctgagcctgaggcccgaagcctgtagacctgccgctggcggagccgtgcacaccagaggcctggatttcgcctgcgacatctacatctgggcccctctggccggcacctgtggcgtgctgctgctgagcctggtcatcaccctgtactgcaaccaccggaataggagcaagcggagcagaggcggccacagcgactacatgaacatgaccccccggaggcctggccccacccggaagcactaccagccctacgcccctcccagggacttcgccgcctaccggagccgggtgaagttcagccggagcgccgacgcccctgcctaccagcagggccagaaccagctgtacaacgagctgaacctgggccggagggaggagtacgacgtgctggacaagcggagaggccgggaccctgagatgggcggcaagccccggagaaagaaccctcaggagggcctgtataacgaactgcagaaagacaagatggccgaggcctacagcgagatcggcatgaagggcgagcggcggaggggcaagggccacgacggcctgtaccagggcctgagcaccgccaccaaggatacctacgacgccctgcacatgcaggccctgccccccaga

SEQ ID NO: 621 - protein, 563 aa, Artificial Sequence
  Description of Artificial Sequence: Synthetic polypeptide
EVQLVESGGGLVQPGGSLRLSCAASGFTFSSYAMSWVRQAPGKGLEWVASISRGGTTYYPDSVKGRFTISRDNVRNILYLQMSSLRSEDTAMYYCGRYDYDGYYAMDYWGQGTLVTVSSGGGGSGGGGSGGGGSDIQMTQSPSSLSASVGDRVTITCKASPDINSYLNWYQQKPGKAPKLLIYRANRLVDGVPSRFSGSGSGTDYTLTISSLQPEDFATYYCLQYDEFPYTFGAGTKVEIKKPTTTPAPRPPTPAPTIASQPLSLRPEASRPAAGGAVHTRGLDFASDKPTTTPAPRPPTPAPTIASQPLSLRPEASRPAAGGAVHTRGLDFASDKPTTTPAPRPPTPAPTIASQPLSLRPEACRPAAGGAVHTRGLDFACDIYIWAPLAGTCGVLLLSLVITLYCNHRNRSKRSRGGHSDYMNMTPRRPGPTRKHYQPYAPPRDFAAYRSRVKFSRSADAPAYQQGQNQLYNELNLGRREEYDVLDKRRGRDPEMGGKPRRKNPQEGLYNELQKDKMAEAYSEIGMKGERRRGKGHDGLYQGLSTATKDTYDALHMQALPPR

SEQ ID NO: 622 - DNA, 1689 bp, Artificial Sequence
  Description of Artificial Sequence: Synthetic polynucleotide
gaagtgcagcttgtggagtcaggaggagggctagttcagccaggcggctctctgagactatcttgtgctgcctccggcttcacatttagctcttatgcaatgtcctgggtccgccaggcccctggtaaaggcctggaatgggttgcttctatctctagaggcggaaccacttactaccctgattcagtgaaggggagattcacaattagtagggacaacgtgcggaacatcctctacctacagatgtcaagtttacgcagtgaggacactgcgatgtattactgcggtcgatacgattatgatggatattatgcaatggattattggggccagggcactctggtcacagtatcttccggcggcggtggttctggcggtggtggaagcggagggggggggtccgacatccagatgacccaatcaccatcgagtcttagtgcatccgttggggatagagtgacaatcacttgtaaggcatccccggacatcaactcatatcttaattggtatcagcaaaagccgggcaaggcccctaagctcctgatttatagggccaaccgccttgtggatggagtcccctcccgctttagtggaagcggctctggcacagactacaccctgactatcagctccttgcagcctgaggattttgctacctactactgtcttcagtacgatgaatttccatacactttcggtgctgggacaaaagtggagatcaaaaagcctaccaccacccccgcacctcgtcctccaacccctgcacctacgattgccagtcagcctctttcactgcggcctgaggccagcagaccagctgccggcggtgccgtccatacaagaggactggacttcgcgtccgataaacctactaccactccagccccaaggcccccaaccccagcaccgactatcgcatcacagcctttgtcactgcgtcctgaagccagccggccagctgcagggggggccgtccacacaaggggactcgactttgcgagtgataagcccaccaccacccctgcccctagacctccaaccccagcccctacaatcgccagccagcccctgagcctgaggcccgaagcctgtagacctgccgctggcggagccgtgcacaccagaggcctggatttcgcctgcgacatctacatctgggcccctctggccggcacctgtggcgtgctgctgctgagcctggtcatcaccctgtactgcaaccaccggaataggagcaagcggagcagaggcggccacagcgactacatgaacatgaccccccggaggcctggccccacccggaagcactaccagccctacgcccctcccagggacttcgccgcctaccggagccgggtgaagttcagccggagcgccgacgcccctgcctaccagcagggccagaaccagctgtacaacgagctgaacctgggccggagggaggagtacgacgtgctggacaagcggagaggccgggaccctgagatgggcggcaagccccggagaaagaaccctcaggagggcctgtataacgaactgcagaaagacaagatggccgaggcctacagcgagatcggcatgaagggcgagcggcggaggggcaagggccacgacggcctgtaccagggcctgagcaccgccaccaaggatacctacgacgccctgcacatgcaggccctgccccccaga

SEQ ID NO: 623 - protein, 563 aa, Artificial Sequence
  Description of Artificial Sequence: Synthetic polypeptide
EVQLVESGGGLVQPGGSLRLSCAASGFTFSSYAMSWVRQAPGKGLEWVSSISRGGTTYYPDSVKGRFTISRDNSKNTLYLQMNSLRAEDTAVYYCGRYDYDGYYAMDYWGQGTLVTVSSGGGGSGGGGSGGGGSDIQMTQSPSSLSASVGDRVTITCKASPDINSYLNWYQQKPGKAPKLLIYRANRLVDGVPSRFSGSGSGTDYTLTISSLQPEDFATYYCLQYDEFPYTFGAGTKVEIKKPTTTPAPRPPTPAPTIASQPLSLRPEASRPAAGGAVHTRGLDFASDKPTTTPAPRPPTPAPTIASQPLSLRPEASRPAAGGAVHTRGLDFASDKPTTTPAPRPPTPAPTIASQPLSLRPEACRPAAGGAVHTRGLDFACDIYIWAPLAGTCGVLLLSLVITLYCNHRNRSKRSRGGHSDYMNMTPRRPGPTRKHYQPYAPPRDFAAYRSRVKFSRSADAPAYQQGQNQLYNELNLGRREEYDVLDKRRGRDPEMGGKPRRKNPQEGLYNELQKDKMAEAYSEIGMKGERRRGKGHDGLYQGLSTATKDTYDALHMQALPPR

SEQ ID NO: 624 - DNA, 1689 bp, Artificial Sequence
  Description of Artificial Sequence: Synthetic polynucleotide
gaagtgcaactggtcgagtctgggggcggccttgtgcaacctggaggcagccttcgactcagttgcgccgcgtctggttttaccttctcctcttacgcgatgagctgggttcgccaggcccccggcaagggacttgagtgggttagttcgatctcccgcggaggcaccacatattatcctgactcggttaagggacgcttcactatctctagggacaattcaaagaacacactgtatctccaaatgaactccttgcgggccgaggacactgctgtgtattattgcggacgatacgactacgatgggtattacgccatggattactgggggcaaggtacactggtcactgtgagttcggggggcggcggaagtggtggagggggaagtggtggaggaggaagcgatatacagatgacacagagcccttcaagtttatctgcaagcgtcggcgatcgtgttacaataacttgcaaggcatctcccgacatcaattcctacctcaactggtatcagcagaagcctgggaaggctcctaagctgcttatttacagagcaaatcgcctggtggacggcgtgcccagtcggttttccgggtctgggagcggaacggattacacactgaccatctcaagcctgcaacccgaagacttcgctacatattactgccttcagtatgatgagttcccatataccttcggcgctgggaccaaggtggagataaagaagcctaccaccacccccgcacctcgtcctccaacccctgcacctacgattgccagtcagcctctttcactgcggcctgaggccagcagaccagctgccggcggtgccgtccatacaagaggactggacttcgcgtccgataaacctactaccactccagccccaaggcccccaaccccagcaccgactatcgcatcacagcctttgtcactgcgtcctgaagccagccggccagctgcagggggggccgtccacacaaggggactcgactttgcgagtgataagcccaccaccacccctgcccctagacctccaaccccagcccctacaatcgccagccagcccctgagcctgaggcccgaagcctgtagacctgccgctggcggagccgtgcacaccagaggcctggatttcgcctgcgacatctacatctgggcccctctggccggcacctgtggcgtgctgctgctgagcctggtcatcaccctgtactgcaaccaccggaataggagcaagcggagcagaggcggccacagcgactacatgaacatgaccccccggaggcctggccccacccggaagcactaccagccctacgcccctcccagggacttcgccgcctaccggagccgggtgaagttcagccggagcgccgacgcccctgcctaccagcagggccagaaccagctgtacaacgagctgaacctgggccggagggaggagtacgacgtgctggacaagcggagaggccgggaccctgagatgggcggcaagccccggagaaagaaccctcaggagggcctgtataacgaactgcagaaagacaagatggccgaggcctacagcgagatcggcatgaagggcgagcggcggaggggcaagggccacgacggcctgtaccagggcctgagcaccgccaccaaggatacctacgacgccctgcacatgcaggccctgccccccaga

SEQ ID NO: 625 - protein, 563 aa, Artificial Sequence
  Description of Artificial Sequence: Synthetic polypeptide
EVQLVESGGGLVQPGGSLRLSCAASGFTFSSYAMSWVRQAPGKGLEWVSSISRGGTTYYPDSVKGRFTISRDNSKNTLYLQMNSLRAEDTAVYYCGRYDYDGYYAMDYWGQGTLVTVSSGGGGSGGGGSGGGGSDIQMTQSPSSLSASVGDRVTITCKASPDINSYLNWYQQKPGKAPKVLIYRANRLVDGVPSRFSGSGSGTDYTLTISSLQPEDFATYYCLQYDEFPYTFGQGTKVEIKKPTTTPAPRPPTPAPTIASQPLSLRPEASRPAAGGAVHTRGLDFASDKPTTTPAPRPPTPAPTIASQPLSLRPEASRPAAGGAVHTRGLDFASDKPTTTPAPRPPTPAPTIASQPLSLRPEACRPAAGGAVHTRGLDFACDIYIWAPLAGTCGVLLLSLVITLYCNHRNRSKRSRGGHSDYMNMTPRRPGPTRKHYQPYAPPRDFAAYRSRVKFSRSADAPAYQQGQNQLYNELNLGRREEYDVLDKRRGRDPEMGGKPRRKNPQEGLYNELQKDKMAEAYSEIGMKGERRRGKGHDGLYQGLSTATKDTYDALHMQALPPR

SEQ ID NO: 626 - DNA, 1689 bp, Artificial Sequence
  Description of Artificial Sequence: Synthetic polynucleotide
gaagtgcaactggtcgagtctgggggcggccttgtgcaacctggaggcagccttcgactcagttgcgccgcgtctggttttaccttctcctcttacgcgatgagctgggttcgccaggcccccggcaagggacttgagtgggttagttcgatctcccgcggaggcaccacatattatcctgactcggttaagggacgcttcactatctctagggacaattcaaagaacacactgtatctccaaatgaactccttgcgggccgaggacactgctgtgtattattgcggacgatacgactacgatgggtattacgccatggattactgggggcaaggtacactggtcactgtgagttcggggggcggcggaagtggtggagggggaagtggtggaggaggaagcgatattcagatgacccagtcgcccagcagtctctcggcctcagtgggcgaccgggtcactatcacttgcaaagcaagtcctgatataaactcctatcttaattggtatcagcagaagcccggcaaggcacctaaggttctgatatatcgcgcaaatcggctcgtggatggagtacccagccgattttccggcagcggctcaggcactgactacacactgacaatcagcagcttgcagcctgaagatttcgccacatactattgtctacagtacgacgagttcccttatacattcggccaggggaccaaggtcgagatcaagaagcctaccaccacccccgcacctcgtcctccaacccctgcacctacgattgccagtcagcctctttcactgcggcctgaggccagcagaccagctgccggcggtgccgtccatacaagaggactggacttcgcgtccgataaacctactaccactccagccccaaggcccccaaccccagcaccgactatcgcatcacagcctttgtcactgcgtcctgaagccagccggccagctgcagggggggccgtccacacaaggggactcgactttgcgagtgataagcccaccaccacccctgcccctagacctccaaccccagcccctacaatcgccagccagcccctgagcctgaggcccgaagcctgtagacctgccgctggcggagccgtgcacaccagaggcctggatttcgcctgcgacatctacatctgggcccctctggccggcacctgtggcgtgctgctgctgagcctggtcatcaccctgtactgcaaccaccggaataggagcaagcggagcagaggcggccacagcgactacatgaacatgaccccccggaggcctggccccacccggaagcactaccagccctacgcccctcccagggacttcgccgcctaccggagccgggtgaagttcagccggagcgccgacgcccctgcctaccagcagggccagaaccagctgtacaacgagctgaacctgggccggagggaggagtacgacgtgctggacaagcggagaggccgggaccctgagatgggcggcaagccccggagaaagaaccctcaggagggcctgtataacgaactgcagaaagacaagatggccgaggcctacagcgagatcggcatgaagggcgagcggcggaggggcaagggccacgacggcctgtaccagggcctgagcaccgccaccaaggatacctacgacgccctgcacatgcaggccctgccccccaga

SEQ ID NO: 627 - protein, 563 aa, Artificial Sequence
  Description of Artificial Sequence: Synthetic polypeptide
EVQLVESGGGLVQPGGSLRLSCSASGFTFSSYAMSWVRQVPGKGLVWISSISRGGTTYYADSVRGRFIISRDNAKNTLYLEMNNLRGEDTAVYYCARYDYDGYYAMDYWGQGTLVTVSSGGGGSGGGGSGGGGSDIQMTQSPSSLSASVGDRVTITCQASPDINSYLNWYQQKPGKAPKLLIYRANNLETGVPSRFSGSGSGTDFTLTISSLQPEDIATYYCLQYDEFPYTFGQGTKLEIKKPTTTPAPRPPTPAPTIASQPLSLRPEASRPAAGGAVHTRGLDFASDKPTTTPAPRPPTPAPTIASQPLSLRPEASRPAAGGAVHTRGLDFASDKPTTTPAPRPPTPAPTIASQPLSLRPEACRPAAGGAVHTRGLDFACDIYIWAPLAGTCGVLLLSLVITLYCNHRNRSKRSRGGHSDYMNMTPRRPGPTRKHYQPYAPPRDFAAYRSRVKFSRSADAPAYQQGQNQLYNELNLGRREEYDVLDKRRGRDPEMGGKPRRKNPQEGLYNELQKDKMAEAYSEIGMKGERRRGKGHDGLYQGLSTATKDTYDALHMQALPPR

SEQ ID NO: 628 - DNA, 1689 bp, Artificial Sequence
  Description of Artificial Sequence: Synthetic polynucleotide
gaggttcaactcgtggagtctggaggcgggctagtgcagcctggcggctccctgcgactgtcttgcagcgcatcaggctttacattcagttcttatgccatgagctgggtgaggcaggtgcccggcaagggtctggtgtggatcagctcaatctccaggggcgggactacatattacgccgattcggtcaggggtcgttttatcattagcagggataatgccaagaacaccttgtatttggagatgaacaacctaagaggcgaagacaccgctgtgtactattgtgcccgttacgactacgatgggtactacgccatggactattggggccagggaaccttggtgactgtgtcaagtggcgggggcggcagcggaggcggtggcagcggaggcggcggttctgatattcaaatgacgcaaagtcccagcagcctctccgcctccgttggagacagggtgactattacatgccaagccagccccgatattaatagctacttaaattggtatcagcagaaacctgggaaggcacctaaacttctcatctaccgcgctaacaatctggagaccggcgtgccgtctagattttccggctctggatcagggaccgattttactctgacaattagttccctgcaacccgaagacatcgccacttattattgcctgcaatatgatgagtttccttacacatttggtcagggaactaaactagagattaagaagcctaccaccacccccgcacctcgtcctccaacccctgcacctacgattgccagtcagcctctttcactgcggcctgaggccagcagaccagctgccggcggtgccgtccatacaagaggactggacttcgcgtccgataaacctactaccactccagccccaaggcccccaaccccagcaccgactatcgcatcacagcctttgtcactgcgtcctgaagccagccggccagctgcagggggggccgtccacacaaggggactcgactttgcgagtgataagcccaccaccacccctgcccctagacctccaaccccagcccctacaatcgccagccagcccctgagcctgaggcccgaagcctgtagacctgccgctggcggagccgtgcacaccagaggcctggatttcgcctgcgacatctacatctgggcccctctggccggcacctgtggcgtgctgctgctgagcctggtcatcaccctgtactgcaaccaccggaataggagcaagcggagcagaggcggccacagcgactacatgaacatgaccccccggaggcctggccccacccggaagcactaccagccctacgcccctcccagggacttcgccgcctaccggagccgggtgaagttcagccggagcgccgacgcccctgcctaccagcagggccagaaccagctgtacaacgagctgaacctgggccggagggaggagtacgacgtgctggacaagcggagaggccgggaccctgagatgggcggcaagccccggagaaagaaccctcaggagggcctgtataacgaactgcagaaagacaagatggccgaggcctacagcgagatcggcatgaagggcgagcggcggaggggcaagggccacgacggcctgtaccagggcctgagcaccgccaccaaggatacctacgacgccctgcacatgcaggccctgccccccaga

SEQ ID NO: 629 - protein, 563 aa, Artificial Sequence
  Description of Artificial Sequence: Synthetic polypeptide
EVQLVESGGGLVQPGGSLRLSCSASGFTFSSYAMSWVRQVPGKGLVWISSISRGGTTYYADSVRGRFIISRDNAKNTLYLEMNNLRGEDTAVYYCARYDYDGYYAMDYWGQGTLVTVSSGGGGSGGGGSGGGGSDIQMTQSPSSLSASVGDRVTITCKASPDINSYLNWYQQKPGKAPKLLIYRANRLVDGVPSRFSGSGSGTDYTLTISSLQPEDFATYYCLQYDEFPYTFGAGTKVEIKKPTTTPAPRPPTPAPTIASQPLSLRPEASRPAAGGAVHTRGLDFASDKPTTTPAPRPPTPAPTIASQPLSLRPEASRPAAGGAVHTRGLDFASDKPTTTPAPRPPTPAPTIASQPLSLRPEACRPAAGGAVHTRGLDFACDIYIWAPLAGTCGVLLLSLVITLYCNHRNRSKRSRGGHSDYMNMTPRRPGPTRKHYQPYAPPRDFAAYRSRVKFSRSADAPAYQQGQNQLYNELNLGRREEYDVLDKRRGRDPEMGGKPRRKNPQEGLYNELQKDKMAEAYSEIGMKGERRRGKGHDGLYQGLSTATKDTYDALHMQALPPR

SEQ ID NO: 630 - DNA, 1689 bp, Artificial Sequence
  Description of Artificial Sequence: Synthetic polynucleotide
gaggttcaactcgtggagtctggaggcgggctagtgcagcctggcggctccctgcgactgtcttgcagcgcatcaggctttacattcagttcttatgccatgagctgggtgaggcaggtgcccggcaagggtctggtgtggatcagctcaatctccaggggcgggactacatattacgccgattcggtcaggggtcgttttatcattagcagggataatgccaagaacaccttgtatttggagatgaacaacctaagaggcgaagacaccgctgtgtactattgtgcccgttacgactacgatgggtactacgccatggactattggggccagggaaccttggtgactgtgtcaagtggcgggggcggcagcggaggcggtggcagcggaggcggcggttctgatatacagatgacacagagcccttcaagtttatctgcaagcgtcggcgatcgtgttacaataacttgcaaggcatctcccgacatcaattcctacctcaactggtatcagcagaagcctgggaaggctcctaagctgcttatttacagagcaaatcgcctggtggacggcgtgcccagtcggttttccgggtctgggagcggaacggattacacactgaccatctcaagcctgcaacccgaagacttcgctacatattactgccttcagtatgatgagttcccatataccttcggcgctgggaccaaggtggagataaagaagcctaccaccacccccgcacctcgtcctccaacccctgcacctacgattgccagtcagcctctttcactgcggcctgaggccagcagaccagctgccggcggtgccgtccatacaagaggactggacttcgcgtccgataaacctactaccactccagccccaaggcccccaaccccagcaccgactatcgcatcacagcctttgtcactgcgtcctgaagccagccggccagctgcagggggggccgtccacacaaggggactcgactttgcgagtgataagcccaccaccacccctgcccctagacctccaaccccagcccctacaatcgccagccagcccctgagcctgaggcccgaagcctgtagacctgccgctggcggagccgtgcacaccagaggcctggatttcgcctgcgacatctacatctgggcccctctggccggcacctgtggcgtgctgctgctgagcctggtcatcaccctgtactgcaaccaccggaataggagcaagcggagcagaggcggccacagcgactacatgaacatgaccccccggaggcctggccccacccggaagcactaccagccctacgcccctcccagggacttcgccgcctaccggagccgggtgaagttcagccggagcgccgacgcccctgcctaccagcagggccagaaccagctgtacaacgagctgaacctgggccggagggaggagtacgacgtgctggacaagcggagaggccgggaccctgagatgggcggcaagccccggagaaagaaccctcaggagggcctgtataacgaactgcagaaagacaagatggccgaggcctacagcgagatcggcatgaagggcgagcggcggaggggcaagggccacgacggcctgtaccagggcctgagcaccgccaccaaggatacctacgacgccctgcacatgcaggccctgccccccaga

SEQ ID NO: 631 - protein, 12 aa, Artificial Sequence
  Description of Artificial Sequence: Synthetic peptide
ESKYGPPCPPCP

SEQ ID NO: 632 - protein, 86 aa, Artificial Sequence
  Description of Artificial Sequence: Synthetic polypeptide
GPKKKRKVAPPTDVSLGDELHLDGEDVAMAHADALDDFDLDMLGDGDSPGPGFTPHDSAPYGALDMADFEFEQMFTDALGIDEYGG

SEQ ID NO: 633 - DNA, 258 bp, Artificial Sequence
  Description of Artificial Sequence: Synthetic polynucleotide
ggccccaagaagaaaaggaaggtggccccccccaccgacgtgagcctgggcgacgagctgcacctggacggcgaggacgtggccatggcccacgccgacgccctggacgacttcgacctggacatgctgggcgacggcgacagccccggccccggcttcaccccccacgacagcgccccctacggcgccctggacatggccgacttcgagttcgagcagatgttcaccgacgccctgggcatcgacgagtacggcggc

SEQ ID NO: 634 - protein, 235 aa, Artificial Sequence
  Description of Artificial Sequence: Synthetic polypeptide
EMPVDRILEAELAVEQKSDQGVEGPGGTGGSGSSPNDPVTNICQAADKQLFTLVEWAKRIPHFSSLPLDDQVILLRAGWNELLIASFSHRSIDVRDGILLATGLHVHRNSAHSAGVGAIFDRVLTELVSKMRDMRMDKTELGCLRAIILFNPEVRGLKSAQEVELLREKVYAALEEYTRTTHPDEPGRFAKLLLRLPSLRSIGLKCLEHLFFFRLIGDVPIDTFLMEMLESPSDS

SEQ ID NO: 635 - DNA, 705 bp, Artificial Sequence
  Description of Artificial Sequence: Synthetic polynucleotide
gagatgcccgtggacaggattctggaggccgaactcgccgtggagcagaaaagcgaccagggcgtggagggccccggcggaaccggcggcagcggcagcagccccaacgaccccgtgaccaacatctgccaggccgccgacaagcagctgttcaccctggtggagtgggccaagaggattccccacttcagcagcctgcccctggacgaccaggtgatcctgctgagggccggatggaacgagctgctgatcgccagcttcagccacaggagcatcgacgtgagggacggcatcctgctggccaccggcctgcacgtccataggaacagcgcccacagcgccggagtgggcgccatcttcgacagggtgctgaccgagctggtgagcaagatgagggacatgaggatggacaagaccgagctgggctgcctgagggccatcatcctgttcaaccccgaggtgaggggcctgaaaagcgcccaggaggtggagctgctgagggagaaggtgtacgccgccctggaggagtacaccaggaccacccaccccgacgagcccggcagattcgccaagctgctgctgaggctgcccagcctgaggagcatcggcctgaagtgcctggagcacctgttcttcttcaggctgatcggcgacgtgcccatcgacaccttcctgatggagatgctggagagccccagcgacagc

SEQ ID NO: 636 - protein, 323 aa, Artificial Sequence
  Description of Artificial Sequence: Synthetic polypeptide
GPKKKRKVAPPTDVSLGDELHLDGEDVAMAHADALDDFDLDMLGDGDSPGPGFTPHDSAPYGALDMADFEFEQMFTDALGIDEYGGEFEMPVDRILEAELAVEQKSDQGVEGPGGTGGSGSSPNDPVTNICQAADKQLFTLVEWAKRIPHFSSLPLDDQVILLRAGWNELLIASFSHRSIDVRDGILLATGLHVHRNSAHSAGVGAIFDRVLTELVSKMRDMRMDKTELGCLRAIILFNPEVRGLKSAQEVELLREKVYAALEEYTRTTHPDEPGRFAKLLLRLPSLRSIGLKCLEHLFFFRLIGDVPIDTFLMEMLESPSDS

SEQ ID NO: 637 - DNA, 969 bp, Artificial Sequence
  Description of Artificial Sequence: Synthetic polynucleotide
ggccccaagaagaaaaggaaggtggccccccccaccgacgtgagcctgggcgacgagctgcacctggacggcgaggacgtggccatggcccacgccgacgccctggacgacttcgacctggacatgctgggcgacggcgacagccccggccccggcttcaccccccacgacagcgccccctacggcgccctggacatggccgacttcgagttcgagcagatgttcaccgacgccctgggcatcgacgagtacggcggcgaattcgagatgcccgtggacaggattctggaggccgaactcgccgtggagcagaaaagcgaccagggcgtggagggccccggcggaaccggcggcagcggcagcagccccaacgaccccgtgaccaacatctgccaggccgccgacaagcagctgttcaccctggtggagtgggccaagaggattccccacttcagcagcctgcccctggacgaccaggtgatcctgctgagggccggatggaacgagctgctgatcgccagcttcagccacaggagcatcgacgtgagggacggcatcctgctggccaccggcctgcacgtccataggaacagcgcccacagcgccggagtgggcgccatcttcgacagggtgctgaccgagctggtgagcaagatgagggacatgaggatggacaagaccgagctgggctgcctgagggccatcatcctgttcaaccccgaggtgaggggcctgaaaagcgcccaggaggtggagctgctgagggagaaggtgtacgccgccctggaggagtacaccaggaccacccaccccgacgagcccggcagattcgccaagctgctgctgaggctgcccagcctgaggagcatcggcctgaagtgcctggagcacctgttcttcttcaggctgatcggcgacgtgcccatcgacaccttcctgatggagatgctggagagccccagcgacagc

SEQ ID NO: 638 - protein, 150 aa, Artificial Sequence
  Description of Artificial Sequence: Synthetic polypeptide
MKLLSSIEQACDICRLKKLKCSKEKPKCAKCLKNNWECRYSPKTKRSPLTRAHLTEVESRLERLEQLFLLIFPREDLDMILKMDSLQDIKALLTGLFVQDNVNKDAVTDRLASVETDMPLTLRQHRISATSSSEESSNKGQRQLTVSPEF

SEQ ID NO: 639 - DNA, 450 bp, Artificial Sequence
  Description of Artificial Sequence: Synthetic polynucleotide
atgaagctgctgagcagcatcgagcaggcttgcgacatctgcaggctgaagaagctgaagtgcagcaaggagaagcccaagtgcgccaagtgcctgaagaacaactgggagtgcagatacagccccaagaccaagaggagccccctgaccagggcccacctgaccgaggtggagagcaggctggagaggctggagcagctgttcctgctgatcttccccagggaggacctggacatgatcctgaagatggacagcctgcaagacatcaaggccctgctgaccggcctgttcgtgcaggacaacgtgaacaaggacgccgtgaccgacaggctggccagcgtggagaccgacatgcccctgaccctgaggcagcacaggatcagcgccaccagcagcagcgaggagagcagcaacaagggccagaggcagctgaccgtgagccccgagttt

SEQ ID NO: 640 - protein, 336 aa, Artificial Sequence
  Description of Artificial Sequence: Synthetic polypeptide
IRPECVVPETQCAMKRKEKKAQKEKDKLPVSTTTVDDHMPPIMQCEPPPPEAARIHEVVPRFLSDKLLVTNRQKNIPQLTANQQFLIARLIWYQDGYEQPSDEDLKRITQTWQQADDENEESDTPFRQITEMTILTVQLIVEFAKGLPGFAKISQPDQITLLKACSSEVMMLRVARRYDAASDSILFANNQAYTRDNYRKAGMAEVIEDLLHFCRCMYSMALDNIHYALLTAVVIFSDRPGLEQPQLVEEIQRYYLNTLRIYILNQLSGSARSSVIYGKILSILSELRTLGMQNSNMCISLKLKNRKLPPFLEEIWDVADMSHTQPPPILESPTNL

SEQ ID NO: 641 - DNA, 1008 bp, Artificial Sequence
  Description of Artificial Sequence: Synthetic polynucleotide
atcaggcccgagtgcgtggtgcccgagacccagtgcgccatgaaaaggaaggagaagaaggcccagaaggagaaggacaagctgcccgtgagcaccaccaccgtcgatgaccacatgccccccatcatgcagtgcgagccccccccccccgaggccgccaggattcacgaggtcgtgcccaggttcctgagcgacaagctgctggtgaccaacaggcagaagaacatcccccagctgaccgccaaccagcagttcctgatcgccaggctgatctggtatcaggacggctacgagcagcccagcgacgaggacctgaaaaggatcacccagacctggcagcaggccgacgacgagaacgaggagagcgacacccccttcaggcagatcaccgagatgaccatcctgaccgtgcagctgatcgtggagttcgccaagggcctgcccggattcgccaagatcagccagcccgaccagatcaccctgctgaaggcttgcagcagcgaggtgatgatgctgagggtggccaggaggtacgacgccgccagcgacagcatcctgttcgccaacaaccaggcttacaccagggacaactacaggaaggctggcatggccgaggtgatcgaggacctcctgcacttctgcagatgtatgtacagcatggccctggacaacatccactacgccctgctgaccgccgtggtgatcttcagcgacaggcccggcctggagcagccccagctggtggaggagatccagaggtactacctgaacaccctgaggatctacatcctgaaccagctgagcggcagcgccaggagcagcgtgatctacggcaagatcctgagcatcctgagcgagctgaggaccctgggaatgcagaacagcaatatgtgtatcagcctgaagctgaagaacaggaagctgccccccttcctggaggagatttgggacgtggccgacatgagccacacccagcccccccccatcctggagagccccaccaacctg

SEQ ID NO: 642 - protein, 335 aa, Artificial Sequence
  Description of Artificial Sequence: Synthetic polypeptide
RPECVVPETQCAMKRKEKKAQKEKDKLPVSTTTVDDHMPPIMQCEPPPPEAARIHEVVPRFLSDKLLVTNRQKNIPQLTANQQFLIARLIWYQDGYEQPSDEDLKRITQTWQQADDENEESDTPFRQITEMTILTVQLIVEFAKGLPGFAKISQPDQITLLKACSSEVMMLRVARRYDAASDSILFANNQAYTRDNYRKAGMAEVIEDLLHFCRCMYSMALDNIHYALLTAVVIFSDRPGLEQPQLVEEIQRYYLNTLRIYILNQLSGSARSSVIYGKILSILSELRTLGMQNSNMCISLKLKNRKLPPFLEEIWDVADMSHTQPPPILESPTNL

SEQ ID NO: 643 - DNA, 1008 bp, Artificial Sequence
  Description of Artificial Sequence: Synthetic polynucleotide
cggcctgagtgcgtagtacccgagactcagtgcgccatgaagcggaaagagaagaaagcacagaaggagaaggacaaactgcctgtcagcacgacgacggtggacgaccacatgccgcccattatgcagtgtgaacctccacctcctgaagcagcaaggattcacgaagtggtcccaaggtttctctccgacaagctgttggtgacaaaccggcagaaaaacatcccccagttgacagccaaccagcagttccttatcgccaggctcatctggtaccaggacgggtacgagcagccttctgatgaagatttgaagaggattacgcagacgtggcagcaagcggacgatgaaaacgaagagtcggacactcccttccgccagatcacagagatgactatcctcacggtccaacttatcgtggagttcgcgaagggattgccagggttcgccaagatctcgcagcctgatcaaattacgctgcttaaggcttgctcaagtgaggtaatgatgctccgagtcgcgcgacgatacgatgcggcctcagacagtattctgttcgcgaacaaccaagcgtacactcgcgacaactaccgcaaggctggcatggccgaggtcatcgaggatctactgcacttctgccggtgcatgtactctatggcgttggacaacatccattacgcgctgctcacggctgtcgtcatcttttctgaccggccagggttggagcagccgcaactggtggaagagatccagcggtactacctgaatacgctccgcatctatatcctgaaccagctgagcgggtcggcgcgttcgtccgtcatatacggcaagatcctctcaatcctctctgagctacgcacgctcggcatgcaaaactccaacatgtgcatctccctcaagctcaagaacagaaagctgccgcctttcctcgaggagatctgggatgtggcggacatgtcgcacacccaaccgccgcctatcctcgagtcccccacgaatctctag

SEQ ID NO: 644 - protein, 488 aa, Artificial Sequence
  Description of Artificial Sequence: Synthetic polypeptide
MKLLSSIEQACDICRLKKLKCSKEKPKCAKCLKNNWECRYSPKTKRSPLTRAHLTEVESRLERLEQLFLLIFPREDLDMILKMDSLQDIKALLTGLFVQDNVNKDAVTDRLASVETDMPLTLRQHRISATSSSEESSNKGQRQLTVSPEFPGIRPECVVPETQCAMKRKEKKAQKEKDKLPVSTTTVDDHMPPIMQCEPPPPEAARIHEVVPRFLSDKLLVTNRQKNIPQLTANQQFLIARLIWYQDGYEQPSDEDLKRITQTWQQADDENEESDTPFRQITEMTILTVQLIVEFAKGLPGFAKISQPDQITLLKACSSEVMMLRVARRYDAASDSILFANNQAYTRDNYRKAGMAEVIEDLLHFCRCMYSMALDNIHYALLTAVVIFSDRPGLEQPQLVEEIQRYYLNTLRIYILNQLSGSARSSVIYGKILSILSELRTLGMQNSNMCISLKLKNRKLPPFLEEIWDVADMSHTQPPPILESPTNL

SEQ ID NO: 645 - DNA, 1467 bp, Artificial Sequence
  Description of Artificial Sequence: Synthetic polynucleotide
atgaagctactgtcttctatcgaacaagcatgcgatatttgccgacttaaaaagctcaagtgctccaaagaaaaaccgaagtgcgccaagtgtctgaagaacaactgggagtgtcgctactctcccaaaaccaaaaggtctccgctgactagggcacatctgacagaagtggaatcaaggctagaaagactggaacagctatttctactgatttttcctcgagaagaccttgacatgattttgaaaatggattctttacaggatataaaagcattgttaacaggattatttgtacaagataatgtgaataaagatgccgtcacagatagattggcttcagtggagactgatatgcctctaacattgagacagcatagaataagtgcgacatcatcatcggaagagagtagtaacaaaggtcaaagacagttgactgtatcgccggaattcccggggatccggcctgagtgcgtagtacccgagactcagtgcgccatgaagcggaaagagaagaaagcacagaaggagaaggacaaactgcctgtcagcacgacgacggtggacgaccacatgccgcccattatgcagtgtgaacctccacctcctgaagcagcaaggattcacgaagtggtcccaaggtttctctccgacaagctgttggtgacaaaccggcagaaaaacatcccccagttgacagccaaccagcagttccttatcgccaggctcatctggtaccaggacgggtacgagcagccttctgatgaagatttgaagaggattacgcagacgtggcagcaagcggacgatgaaaacgaagagtcggacactcccttccgccagatcacagagatgactatcctcacggtccaacttatcgtggagttcgcgaagggattgccagggttcgccaagatctcgcagcctgatcaaattacgctgcttaaggcttgctcaagtgaggtaatgatgctccgagtcgcgcgacgatacgatgcggcctcagacagtattctgttcgcgaacaaccaagcgtacactcgcgacaactaccgcaaggctggcatggccgaggtcatcgaggatctactgcacttctgccggtgcatgtactctatggcgttggacaacatccattacgcgctgctcacggctgtcgtcatcttttctgaccggccagggttggagcagccgcaactggtggaagagatccagcggtactacctgaatacgctccgcatctatatcctgaaccagctgagcgggtcggcgcgttcgtccgtcatatacggcaagatcctctcaatcctctctgagctacgcacgctcggcatgcaaaactccaacatgtgcatctccctcaagctcaagaacagaaagctgccgcctttcctcgaggagatctgggatgtggcggacatgtcgcacacccaaccgccgcctatcctcgagtcccccacgaatctctag

SEQ ID NO: 646 - protein, 487 aa, Artificial Sequence
  Description of Artificial Sequence: Synthetic polypeptide
MKLLSSIEQACDICRLKKLKCSKEKPKCAKCLKNNWECRYSPKTKRSPLTRAHLTEVESRLERLEQLFLLIFPREDLDMILKMDSLQDIKALLTGLFVQDNVNKDAVTDRLASVETDMPLTLRQHRISATSSSEESSNKGQRQLTVSPEFPGRPECVVPETQCAMKRKEKKAQKEKDKLPVSTTTVDDHMPPIMQCEPPPPEAARIHEVVPRFLSDKLLVTNRQKNIPQLTANQQFLIARLIWYQDGYEQPSDEDLKRITQTWQQADDENEESDTPFRQITEMTILTVQLIVEFAKGLPGFAKISQPDQITLLKACSSEVMMLRVARRYDAASDSILFANNQAYTRDNYRKAGMAEVIEDLLHFCRCMYSMALDNIHYALLTAVVIFSDRPGLEQPQLVEEIQRYYLNTLRIYILNQLSGSARSSVIYGKILSILSELRTLGMQNSNMCISLKLKNRKLPPFLEEIWDVADMSHTQPPPILESPTNL

SEQ ID NO: 647 - DNA, 1464 bp, Artificial Sequence
  Description of Artificial Sequence: Synthetic polynucleotide
atgaagctgctgagcagcatcgagcaggcttgcgacatctgcaggctgaagaagctgaagtgcagcaaggagaagcccaagtgcgccaagtgcctgaagaacaactgggagtgcagatacagccccaagaccaagaggagccccctgaccagggcccacctgaccgaggtggagagcaggctggagaggctggagcagctgttcctgctgatcttccccagggaggacctggacatgatcctgaagatggacagcctgcaagacatcaaggccctgctgaccggcctgttcgtgcaggacaacgtgaacaaggacgccgtgaccgacaggctggccagcgtggagaccgacatgcccctgaccctgaggcagcacaggatcagcgccaccagcagcagcgaggagagcagcaacaagggccagaggcagctgaccgtgagccccgagtttcccgggcggcctgagtgcgtagtacccgagactcagtgcgccatgaagcggaaagagaagaaagcacagaaggagaaggacaaactgcctgtcagcacgacgacggtggacgaccacatgccgcccattatgcagtgtgaacctccacctcctgaagcagcaaggattcacgaagtggtcccaaggtttctctccgacaagctgttggtgacaaaccggcagaaaaacatcccccagttgacagccaaccagcagttccttatcgccaggctcatctggtaccaggacgggtacgagcagccttctgatgaagatttgaagaggattacgcagacgtggcagcaagcggacgatgaaaacgaagagtcggacactcccttccgccagatcacagagatgactatcctcacggtccaacttatcgtggagttcgcgaagggattgccagggttcgccaagatctcgcagcctgatcaaattacgctgcttaaggcttgctcaagtgaggtaatgatgctccgagtcgcgcgacgatacgatgcggcctcagacagtattctgttcgcgaacaaccaagcgtacactcgcgacaactaccgcaaggctggcatggccgaggtcatcgaggatctactgcacttctgccggtgcatgtactctatggcgttggacaacatccattacgcgctgctcacggctgtcgtcatcttttctgaccggccagggttggagcagccgcaactggtggaagagatccagcggtactacctgaatacgctccgcatctatatcctgaaccagctgagcgggtcggcgcgttcgtccgtcatatacggcaagatcctctcaatcctctctgagctacgcacgctcggcatgcaaaactccaacatgtgcatctccctcaagctcaagaacagaaagctgccgcctttcctcgaggagatctgggatgtggcggacatgtcgcacacccaaccgccgcctatcctcgagtcccccacgaatctctag

SEQ ID NO: 648 - protein, 113 aa, Artificial Sequence
  Description of Artificial Sequence: Synthetic polypeptide
QVQLQESGPGLVKPSDTLSLTCAVSGYSIVSHYYWHWIRQPPGKGLEWMGYISSDGSNDFNPSLKTRITISRDTSKNQFSLKLSSVTAVDTAVYYCVRGVDYWGQGTLVTVSS

SEQ ID NO: 649 - DNA, 339 bp, Artificial Sequence
  Description of Artificial Sequence: Synthetic polynucleotide
caggtgcagctgcaggagagcggccccggcctggtgaagcccagcgacaccctgagcctgacctgcgccgtgagcggctacagcatcgtgagccactactactggcactggatcagacagccccccggcaagggcctggagtggatgggctacatcagcagcgacggcagcaacgacttcaaccccagcctgaagaccagaatcaccatcagcagagacaccagcaagaaccagttcagcctgaagctgagcagcgtgaccgccgtggacaccgccgtgtactactgcgtgagaggcgtggactactggggccagggcaccctggtgaccgtgagcagc

SEQ ID NO: 650 - protein, 113 aa, Artificial Sequence
  Description of Artificial Sequence: Synthetic polypeptide
QVQLQESGPGLVKPSQTLSLTCAVYGYSIVSHYYWSWIRQPPGKGLEWIGEISSDGSNNYNPSLKSRVTISVDTSKNQFSLKLSSVTAADTAVYYCVRGVDYWGQGTLVTVSS

SEQ ID NO: 651 - DNA, 339 bp, Artificial Sequence
  Description of Artificial Sequence: Synthetic polynucleotide
caggtgcagctgcaggagagcggccccggcctggtgaagcccagccagaccctgagcctgacctgcgccgtgtacggctacagcatcgtgagccactactactggagctggatcagacagccccccggcaagggcctggagtggatcggcgagatcagcagcgacggcagcaacaactacaaccccagcctgaagagcagagtgaccatcagcgtggacaccagcaagaaccagttcagcctgaagctgagcagcgtgaccgccgccgacaccgccgtgtactactgcgtgagaggcgtggactactggggccagggcaccctggtgaccgtgagcagc

SEQ ID NO: 652 - protein, 113 aa, Artificial Sequence
  Description of Artificial Sequence: Synthetic polypeptide
QVQLQESGPGLVKPSETLSLTCAVSGYSIVSHYYWGWIRQPPGKGLEWIGSISSDGSNYYNPSLKSRVTISVDTSKNQFSLKLSSVTAADTAVYYCVRGVDYWGQGTLVTVSS

SEQ ID NO: 653 - DNA, 339 bp, Artificial Sequence
  Description of Artificial Sequence: Synthetic polynucleotide
caggtgcagctgcaggagagcggccccggcctggtgaagcccagcgagaccctgagcctgacctgcgccgtgagcggctacagcatcgtgagccactactactggggctggatcagacagccccccggcaagggcctggagtggatcggcagcatcagcagcgacggcagcaactactacaaccccagcctgaagagcagagtgaccatcagcgtggacaccagcaagaaccagttcagcctgaagctgagcagcgtgaccgccgccgacaccgccgtgtactactgcgtgagaggcgtggactactggggccagggcaccctggtgaccgtgagcagc

SEQ ID NO: 654 - protein, 113 aa, Artificial Sequence
  Description of Artificial Sequence: Synthetic polypeptide
QVQLVESGGGVVQPGRSLRLSCAASGYSIVSHYYWNWVRQAPGKGLEWVAYISSDGSNEYNPSLKNRFTISRDNSKNTLYLQMNSLRAEDTAVYYCVRGVDYWGQGTTVTVSS

SEQ ID NO: 655 - DNA, 339 bp, Artificial Sequence
  Description of Artificial Sequence: Synthetic polynucleotide
caggtgcagctggtggagagcggcggcggcgtggtgcagcccggcagaagcctgagactgagctgcgccgccagcggctacagcatcgtgagccactactactggaactgggtgagacaggcccccggcaagggcctggagtgggtggcctacatcagcagcgacggcagcaacgagtacaaccccagcctgaagaacagattcaccatcagcagagacaacagcaagaacaccctgtacctgcagatgaacagcctgagagccgaggacaccgccgtgtactactgcgtgagaggcgtggactactggggccagggcaccaccgtgaccgtgagcagc

SEQ ID NO: 656 - protein, 113 aa, Artificial Sequence
  Description of Artificial Sequence: Synthetic polypeptide
QVQLQESGPGLVKPSQTLSLTCTVSGYSIVSHYYWNWIRQHPGKGLEWIGYISSDGSNEYNPSLKNLVTISVDTSKNQFSLKLSSVTAADTAVYYCVRGVDYWGQGTMVTVSS

SEQ ID NO: 657 - DNA, 339 bp, Artificial Sequence
  Description of Artificial Sequence: Synthetic polynucleotide
caggtgcagctgcaggagagcggccccggcctggtgaagcccagccagaccctgagcctgacctgcaccgtgagcggctacagcatcgtgagccactactactggaactggatcagacagcaccccggcaagggcctggagtggatcggctacatcagcagcgacggcagcaacgagtacaaccccagcctgaagaacctggtgaccatcagcgtggacaccagcaagaaccagttcagcctgaagctgagcagcgtgaccgccgccgacaccgccgtgtactactgcgtgagaggcgtggactactggggccagggcaccatggtgaccgtgagcagc

SEQ ID NO: 658 - protein, 113 aa, Artificial Sequence
  Description of Artificial Sequence: Synthetic polypeptide
QVQLQESGPGLVKPSDTLSLTCAVSGYSIVSHYYWNWIRQPPGKGLEWIGYISSDGSNEYNPSLKNRVTMSVDTSKNQFSLKLSSVTAVDTAVYYCVRGVDYWGQGTMVTVSS

SEQ ID NO: 659 - DNA, 339 bp, Artificial Sequence
  Description of Artificial Sequence: Synthetic polynucleotide
caggtgcagctgcaggagagcggccccggcctggtgaagcccagcgacaccctgagcctgacctgcgccgtgagcggctacagcatcgtgagccactactactggaactggatcagacagccccccggcaagggcctggagtggatcggctacatcagcagcgacggcagcaacgagtacaaccccagcctgaagaacagagtgaccatgagcgtggacaccagcaagaaccagttcagcctgaagctgagcagcgtgaccgccgtggacaccgccgtgtactactgcgtgagaggcgtggactactggggccagggcaccatggtgaccgtgagcagc

SEQ ID NO: 660 - protein, 113 aa, Artificial Sequence
  Description of Artificial Sequence: Synthetic polypeptide
EVQLLESGGGLVQPGGSLRLSCAASGYSIVSHYYWNWVRQAPGKGLEWVSYISSDGSNEYNPSLKNRFTISRDNSKNTLYLQMNSLRAEDTAVYYCVRGVDYWGQGTLVTVSS

SEQ ID NO: 661 - DNA, 339 bp, Artificial Sequence
  Description of Artificial Sequence: Synthetic polynucleotide
gaggtgcagctgctggagagcggcggcggcctggtgcagcccggcggcagcctgagactgagctgcgccgccagcggctacagcatcgtgagccactactactggaactgggtgagacaggcccccggcaagggcctggagtgggtgagctacatcagcagcgacggcagcaacgagtacaaccccagcctgaagaacagattcaccatcagcagagacaacagcaagaacaccctgtacctgcagatgaacagcctgagagccgaggacaccgccgtgtactactgcgtgagaggcgtggactactggggccagggcaccctggtgaccgtgagcagc

SEQ ID NO: 662 - protein, 106 aa, Artificial Sequence
  Description of Artificial Sequence: Synthetic polypeptide
DIQMTQSPSSLSASVGDRVTITCRASRDINNFLAWYQQKPGKAPKLLLYRANRLESGVPSRFSGSGSGTDYTLTISSLQPEDFATYYCLQYGDLYTFGGGTKVEIK

SEQ ID NO: 663 - DNA, 318 bp, Artificial Sequence
  Description of Artificial Sequence: Synthetic polynucleotide
gacatccagatgacccagagccccagcagcctgagcgccagcgtgggcgacagagtgaccatcacctgcagagccagcagagacatcaacaacttcctggcctggtaccagcagaagcccggcaaggcccccaagctgctgctgtacagagccaacagactggagagcggcgtgcccagcagattcagcggcagcggcagcggcaccgactacaccctgaccatcagcagcctgcagcccgaggacttcgccacctactactgcctgcagtacggcgacctgtacaccttcggcggcggcaccaaggtggagatcaag

SEQ ID NO: 664 - protein, 106 aa, Artificial Sequence
  Description of Artificial Sequence: Synthetic polypeptide
DIQMTQSPSSLSASVGDRVTITCKASRDINNFLSWYQQKPGKAPKLLIYRANRLVDGVPSRFSGSGSGTDFTFTISSLQPEDIATYYCLQYGDLYTFGGGTKVEIK

SEQ ID NO: 665 - DNA, 318 bp, Artificial Sequence
  Description of Artificial Sequence: Synthetic polynucleotide
gacatccagatgacccagagccccagcagcctgagcgccagcgtgggcgacagagtgaccatcacctgcaaggccagcagagacatcaacaacttcctgagctggtaccagcagaagcccggcaaggcccccaagctgctgatctacagagccaacagactggtggacggcgtgcccagcagattcagcggcagcggcagcggcaccgacttcaccttcaccatcagcagcctgcagcccgaggacatcgccacctactactgcctgcagtacggcgacctgtacaccttcggcggcggcaccaaggtggagatcaag

SEQ ID NO: 666 - protein, 106 aa, Artificial Sequence
  Description of Artificial Sequence: Synthetic polypeptide
DIQMTQSPSSLSASVGDRVTITCKASRDINNFLSWYQQKPGKAPKLLIYRANRLVDGVPSRFSGSGSGTDFTLTISSLQPEDFATYYCLQYGDLYTFGQGTKVEIK

SEQ ID NO: 667 - DNA, 318 bp, Artificial Sequence
  Description of Artificial Sequence: Synthetic polynucleotide
gacatccagatgacccagagccccagcagcctgagcgccagcgtgggcgacagagtgaccatcacctgcaaggccagcagagacatcaacaacttcctgagctggtaccagcagaagcccggcaaggcccccaagctgctgatctacagagccaacagactggtggacggcgtgcccagcagattcagcggcagcggcagcggcaccgacttcaccctgaccatcagcagcctgcagcccgaggacttcgccacctactactgcctgcagtacggcgacctgtacaccttcggccagggcaccaaggtggagatcaag

SEQ ID NO: 668 - protein, 106 aa, Artificial Sequence
  Description of Artificial Sequence: Synthetic polypeptide
EIVLTQSPGTLSLSPGERATLSCKASRDINNFLSWYQQKPGQAPRLLIYRANRLVDGIPDRFSGSGSGTDFTLTISRLEPEDFAVYYCLQYGDLYTFGQGTKVEIK

SEQ ID NO: 669 - DNA, 318 bp, Artificial Sequence
  Description of Artificial Sequence: Synthetic polynucleotide
gagatcgtgctgacccagagccccggcaccctgagcctgagccccggcgagagagccaccctgagctgcaaggccagcagagacatcaacaacttcctgagctggtaccagcagaagcccggccaggcccccagactgctgatctacagagccaacagactggtggacggcatccccgacagattcagcggcagcggcagcggcaccgacttcaccctgaccatcagcagactggagcccgaggacttcgccgtgtactactgcctgcagtacggcgacctgtacaccttcggccagggcaccaaggtggagatcaag

SEQ ID NO: 670 - protein, 106 aa, Artificial Sequence
  Description of Artificial Sequence: Synthetic polypeptide
EIVLTQSPATLSLSPGERATLSCKASRDINNFLSWYQQKPGQAPRLLIYRANRLVDGIPARFSGSGSGTDFTLTISSLEPEDFAVYYCLQYGDLYTFGQGTKVEIK

SEQ ID NO: 671 - DNA, 318 bp, Artificial Sequence
  Description of Artificial Sequence: Synthetic polynucleotide
gagatcgtgctgacccagagccccgccaccctgagcctgagccccggcgagagagccaccctgagctgcaaggccagcagagacatcaacaacttcctgagctggtaccagcagaagcccggccaggcccccagactgctgatctacagagccaacagactggtggacggcatccccgccagattcagcggcagcggcagcggcaccgacttcaccctgaccatcagcagcctggagcccgaggacttcgccgtgtactactgcctgcagtacggcgacctgtacaccttcggccagggcaccaaggtggagatcaag

SEQ ID NO: 672 - protein, 122 aa, Artificial Sequence
  Description of Artificial Sequence: Synthetic polypeptide
VKLQESGGGFVKPGGSLKVSCAASGFTFSSYAMSWVRLSPEMRLEWVATISSAGGYIFYSDSVQGRFTISRDNAKNTLHLQMGSLRSGDTAMYYCARQGFGNYGDYYAMDYWGQGTTVTVSS

SEQ ID NO: 673 - DNA, 366 bp, Artificial Sequence
  Description of Artificial Sequence: Synthetic polynucleotide
gtgaagctgcaagagtccggcggaggctttgtgaagcctggcggctctctgaaagtgtcctgtgccgccagcggcttcacctttagcagctacgccatgagctgggtccgactgagccctgagatgagactggaatgggtcgccaccatcagtagcgcaggcggctacatcttctacagcgactctgtgcagggcagattcaccatcagccgggacaacgccaagaacaccctgcacctccagatgggcagtctgagaagcggcgataccgccatgtactactgcgccagacaaggcttcggcaactacggcgactactatgccatggattactggggccagggcaccaccgtgacagtctcttct

SEQ ID NO: 674 - protein, 121 aa, Artificial Sequence
  Description of Artificial Sequence: Synthetic polypeptide
VKLEESGGGFVKPGGSLKISCAASGFTFRNYAMSWVRLSPEMRLEWVATISSAGGYIFYSDSVQGRFTISRDNAKNTHLQMGSLRSGDTAMYYCARQGFGNYGDYYAMDYWGQGTTVTVSS

SEQ ID NO: 675 - DNA, 365 bp, Artificial Sequence
  Description of Artificial Sequence: Synthetic polynucleotide
gtgaagctggaagagtccggcggaggctttgtgaagcctggcggaagcctgaagatcagctgtgccgccagcggcttcaccttcagaaactacgccatgagctgggtccgactgagccccgagatgagactggaatgggtcgccacaatcagcagcgcaggcggctacatcttctacagcgatagcgtgcagggcagattcaccatcagccgggacaacgccaagaacaccctgcacctccagatgggcagtctgagatctggcgacaccgccatgtactactggccagacaaggcttcggcaactacggcgactactatgccatggattactggggccagggcaccaccgtgacagtctcttct

SEQ ID NO: 676 - protein, 113 aa, Artificial Sequence
  Description of Artificial Sequence: Synthetic polypeptide
DVQLLESGPGLVRPSQSLSLTCSVTGYSIVSHYYWNWIRQFPGNKLEWMGYISSDGSNEYNPSLKNRISISLDTSKNQFFLKFDFVTTADTATYFCVRGVDYWGQGTTLTVSS

SEQ ID NO: 677 - DNA, 339 bp, Artificial Sequence
  Description of Artificial Sequence: Synthetic polynucleotide
gacgtgcaacttctggagagcgggccagggctagtcaggccctcccagtcgctttcactgacttgcagtgtgaccggttactctattgtgagtcactactattggaactggattcggcagttcccaggcaacaaactggaatggatggggtacatatcttccgatggctcgaatgaatataacccatcattgaaaaatcgtatttccatcagtctggatacgagtaaaaaccagtttttcctcaaattcgatttcgtgactacagcagatactgccacatacttctgtgtacgaggtgtcgattattggggacagggcacaacgctgaccgtaagttct

SEQ ID NO: 678 - protein, 116 aa, Artificial Sequence
  Description of Artificial Sequence: Synthetic polypeptide
DVQLQESGPGLVNPSQSLSLTCTVTGYSITNDYAWNWIRQFPGNKLEWMGYINYSGYTTYNPSLKSRISITRDTSKNQFFLHLNSVTTEDTATYYCARWDGGLTYWGQGTLVTVSA

SEQ ID NO: 679 - DNA, 348 bp, Artificial Sequence
  Description of Artificial Sequence: Synthetic polynucleotide
gacgttcagctgcaagagtctggccctggcctggtcaatcctagccagagcctgagcctgacatgtaccgtgaccggctacagcatcaccaacgactacgcctggaactggatcagacagttccccggcaacaagctggaatggatgggctacatcaactacagcggctacaccacctacaatcccagcctgaagtcccggatctccatcaccagagacaccagcaagaaccagttcttcctgcacctgaacagcgtgaccaccgaggataccgccacctactactgcgctagatgggatggcggcctgacatattggggccagggaacactggtcaccgtgtctgct

SEQ ID NO: 680 - protein, 116 aa, Artificial Sequence
  Description of Artificial Sequence: Synthetic polypeptide
EVQLVESGGGLVQPGGSLRLSCAASGYSITNDYAWNWVRQAPGKGLEWVGYINYSGYTTYNPSLKSRFTISRDNSKNTLYLQMNSLRAEDTAVYYCARWDGGLTYWGQGTLVTVSS

SEQ ID NO: 681 - DNA, 348 bp, Artificial Sequence
  Description of Artificial Sequence: Synthetic polynucleotide
gaggtgcagctggtggagagcggcggcggcctggtgcagcccggcggcagcctgaggctgagctgcgccgccagcggctacagcatcaccaacgactacgcctggaactgggtgaggcaggcccccggcaagggcctggagtgggtgggctacatcaactacagcggctacaccacctacaaccccagcctgaagagcaggttcaccatcagcagggacaacagcaagaacaccctgtacctgcagatgaacagcctgagggccgaggacaccgccgtgtactactgcgccaggtgggacggcggcctgacctactggggccagggcaccctggtgaccgtgagcagc

SEQ ID NO: 682 - protein, 116 aa, Artificial Sequence
  Description of Artificial Sequence: Synthetic polypeptide
EVQLVESGGGLVQPGGSLRLSCAASGYSITNDYAWNWVRQAPGKGLEWVGYINYSGYTTYNPSLKSRFTISRDNSKNTFYLQMNSLRAEDTAVYYCARWDGGLTYWGQGTLVTVSS

SEQ ID NO: 683 - DNA, 348 bp, Artificial Sequence
  Description of Artificial Sequence: Synthetic polynucleotide
gaggtgcagctggtggagagcggcggcggcctggtgcagcccggcggcagcctgaggctgagctgcgccgccagcggctacagcatcaccaacgactacgcctggaactgggtgaggcaggcccccggcaagggcctggagtgggtgggctacatcaactacagcggctacaccacctacaaccccagcctgaagagcaggttcaccatcagcagggacaacagcaagaacaccttctacctgcagatgaacagcctgagggccgaggacaccgccgtgtactactgcgccaggtgggacggcggcctgacctactggggccagggcaccctggtgaccgtgagcagc

SEQ ID NO: 684 - protein, 120 aa, Artificial Sequence
  Description of Artificial Sequence: Synthetic polypeptide
EVQLQQSGAELVKPGASVKLSCTASGFNIKDTYMHWVKQRPEQGLEWIGRVDPANGNTKYDPKFQGKATLTADTSSNTAYLQLSSLTSEDTAVYFCVRDYYGHTYGFAFCDQGTTLTVSA

SEQ ID NO: 685 - DNA, 360 bp, Artificial Sequence
  Description of Artificial Sequence: Synthetic polynucleotide
gaggttcagctgcagcagtctggcgccgaacttgtgaaacctggcgcctctgtgaagctgagctgtaccgccagcggcttcaacatcaaggacacctacatgcactgggtcaagcagaggcctgagcagggcctcgaatggatcggaagagtggatcccgccaacggcaacaccaaatacgaccccaagttccagggcaaagccacactgaccgccgacacctctagcaacacagcctacctgcagctgtccagcctgacctctgaagataccgccgtgtacttctgcgtgcgggactactacggccatacctacggcttcgccttctgcgaccaaggcacaaccctgacagtgtctgct

SEQ ID NO: 686 - protein, 120 aa, Artificial Sequence
  Description of Artificial Sequence: Synthetic polypeptide
EVQLVESGGGLVQPGGSLRLSCAASGFNIKDTYMHWVRQAPGKGLEWVGRVDPANGNTKYDPKFQGRFTISADTSKNTAYLQMNSLRAEDTAVYYCVRDYYGHTYGFAFWGQGTLVTVSS

SEQ ID NO: 687 - DNA, 360 bp, Artificial Sequence
  Description of Artificial Sequence: Synthetic polynucleotide
gaggtgcagctggttgaatctggcggaggactggttcagcctggcggatctctgagactgtcttgtgccgccagcggcttcaacatcaaggacacctacatgcactgggtccgacaggcccctggcaaaggacttgagtgggttggaagagtggaccccgccaacggcaacaccaaatacgaccccaagttccagggcagattcaccatcagcgccgacaccagcaagaacaccgcctacctgcagatgaacagcctgagagccgaggacaccgccgtgtactattgcgtgcgggattactacggccatacctacggcttcgccttttggggccagggcacactggttaccgttagctct

SEQ ID NO: 688 - protein, 113 aa, Artificial Sequence
  Description of Artificial Sequence: Synthetic polypeptide
DIELTQSPSSLAVSAGEKVTMSCKSSQSLLNSRTRKNQLAWYQQKPGQSPELLIYWASTRQSGVPDRFTGSGSGTDFTLTISSVQAEDLAVYYCQQSYNLLTFGPGTKLEVKR

SEQ ID NO: 689 - DNA, 339 bp, Artificial Sequence
  Description of Artificial Sequence: Synthetic polynucleotide
gacatcgagctgacacagagcccatctagcctggctgtgtctgccggcgagaaagtgaccatgagctgcaagagcagccagagcctgctgaacagccggaccagaaagaatcagctggcctggtatcagcagaagcccggccaatctcctgagctgctgatctactgggccagcacaagacagagcggcgtgcccgatagattcacaggatctggcagcggcaccgacttcaccctgacaatcagttctgtgcaggccgaggacctggccgtgtactactgtcagcagagctacaacctgctgaccttcggacccggcaccaagctggaagtgaagaga

SEQ ID NO: 690 - protein, 113 aa, Artificial Sequence
  Description of Artificial Sequence: Synthetic polypeptide
DIELTQSPSSLAVSAGEKVTMSCKSSQSLLNSRTRKNQLAWYQQKTGQSPELLIYWASTRQSGVPDRFTGSGSGTDFTLTISSVQAEDLAVYYCQQSYNLLTFGPGTKLEIKR

SEQ ID NO: 691 - DNA, 339 bp, Artificial Sequence
  Description of Artificial Sequence: Synthetic polynucleotide
gacatcgagctgacacagagcccatctagcctggctgtgtctgccggcgagaaagtgaccatgagctgcaagagcagccagagcctgctgaacagccggaccagaaagaatcagctggcctggtatcagcagaaaaccggacagagccccgagctgctgatctactgggccagcacaagacagagcggcgtgcccgatagattcacaggatctggcagcggcaccgacttcaccctgacaatcagttctgtgcaggccgaggacctggccgtgtactactgtcagcagagctacaacctgctgaccttcggacccggcaccaagctggaaatcaagaga

SEQ ID NO: 692 - protein, 106 aa, Artificial Sequence
  Description of Artificial Sequence: Synthetic polypeptide
DIKMAQSPSSVNASLGERVTITCKASRDINNFLSWFHQKPGKSPKTLIYRANRLVDGVPSRFSGSGSGQDYSFTISSLEYEDVGIYYCLQYGDLYTFGGGTKLEIK

SEQ ID NO: 693 - DNA, 318 bp, Artificial Sequence
  Description of Artificial Sequence: Synthetic polynucleotide
gacatcaagatggctcagtccccttctagcgtgaatgcttcgctaggggagcgtgtgaccatcacatgtaaagcatcacgcgacataaataatttcctttcctggtttcatcagaaaccgggcaagtcgcctaagacgctgatttacagagcaaatcggttggtagatggagtgccaagcagattcagcgggagcggaagtggacaggattatagcttcactatttcatccctggaatacgaggacgtaggtatctattattgcctccagtatggcgatctttacacatttggtggggggactaagctggagattaag

SEQ ID NO: 694 - protein, 107 aa, Artificial Sequence
  Description of Artificial Sequence: Synthetic polypeptide
DIQMTQSSSFLSVSLGGRVTITCKASDLIHNWLAWYQQKPGNAPRLLISGATSLETGVPSRFSGSGSGNDYTLSIASLQTEDAATYYCQQYWTTPFTFGSGTKLEIK

SEQ ID NO: 695 - DNA, 321 bp, Artificial Sequence
  Description of Artificial Sequence: Synthetic polynucleotide
gacatccagatgacccagagcagcagcttcctgagcgtgtcccttggcggcagagtgaccatcacctgtaaagccagcgacctgatccacaactggctggcctggtatcagcagaagcctggcaacgctcccagactgctgattagcggcgccacctctctggaaacaggcgtgccaagcagattttccggcagcggctccggcaacgactacacactgtctattgccagcctgcagaccgaggatgccgccacctattactgccagcagtactggaccacacctttcacctttggcagcggcaccaagctggaaatcaag

SEQ ID NO: 696 - protein, 108 aa, Artificial Sequence
  Description of Artificial Sequence: Synthetic polypeptide
DIQMTQSPSSLSASVGDRVTITCKASDLIHNWLAWYQQKPGKAPKLLISGATSLETGVPSRFSGSGSGTDFTLTISSLQPEDFATYYCQQYWTTPFTFGQGTKVEIKR

SEQ ID NO: 697 - DNA, 324 bp, Artificial Sequence
  Description of Artificial Sequence: Synthetic polynucleotide
gacatccagatgacccagagccccagcagcctgagcgccagcgtgggcgacagggtgaccatcacctgcaaggccagcgacctgatccacaactggctggcctggtaccagcagaagcccggcaaggcccccaagctgctgatcagcggcgccaccagcctggagaccggcgtgcccagcaggttcagcggcagcggcagcggcaccgacttcaccctgaccatcagcagcctgcagcccgaggacttcgccacctactactgccagcagtactggaccacccccttcaccttcggccagggcaccaaggtggagatcaagagg

SEQ ID NO: 698 - protein, 109 aa, Artificial Sequence
  Description of Artificial Sequence: Synthetic polypeptide
DIVLTQSPAIMSASLGERVTMTCTASSSVSSSYLHWYQQKPGSSPKLWIYSTSNLASGVPGRFSGSGSGTSYSLTISSMEAEDAATYYCHQYHRSPYTFGGGTKVEIKR

SEQ ID NO: 699 - DNA, 327 bp, Artificial Sequence
  Description of Artificial Sequence: Synthetic polynucleotide
gacatcgtgctgacacagagccctgccatcatgtctgccagcctcggcgagcgagtgaccatgacatgtacagccagcagcagcgtgtccagcagctacctgcattggtatcagcagaagcccggcagcagccccaagctgtggatctacagcacaagcaatctggccagcggcgtgccaggcagattttctggttctggcagcggcaccagctacagcctgacaatcagcagcatggaagccgaggatgccgccacctactactgccaccagtaccacagaagcccctacacctttggcggaggcaccaaggtggaaatcaagcgg

SEQ ID NO: 700 - protein, 109 aa, Artificial Sequence
  Description of Artificial Sequence: Synthetic polypeptide
DIQMTQSPSSLSASVGDRVTITCTASSSVSSSYLHWYQQKPGKAPKLLIYSTSNLASGVPSRFSGSGSGTDFTLTISSLQPEDFATYYCHQYHRSPYTFGQGTKVEIKR

SEQ ID NO: 701 - DNA, 327 bp, Artificial Sequence
  Description of Artificial Sequence: Synthetic polynucleotide
gacatccagatgacacagagccctagcagcctgtctgccagcgtgggagacagagtgaccatcacctgtacagccagcagcagcgtgtccagcagctacctgcattggtatcagcagaagcccggcaaggcccctaagctgctgatctacagcaccagcaatctggccagcggcgtgccaagcagattttctggctctggcagcggcaccgacttcaccctgaccatatctagcctgcagcctgaggacttcgccacctactactgccaccagtaccacagaagcccctacacctttggccagggcaccaaggtggaaatcaagcgg

SEQ ID NO: 702 - DNA, 570 bp, Artificial Sequence
  Description of Artificial Sequence: Synthetic polynucleotide
ccccctctccctcccccccccctaacgttactggccgaagccgcttggaataaggccggtgtgcgtttgtctatatgttattttccaccatattgccgtcttttggcaatgtgagggcccggaaacctggccctgtcttcttgacgagcattcctaggggtctttcccctctcgccaaaggaatgcaaggtctgttgaatgtcgtgaaggaagcagttcctctggaagcttcttgaagacaaacaacgtctgtagcgaccctttgcaggcagcggaaccccccacctggcgacaggtgcctctgcggccaaaagccacgtgtataagatacacctgcaaaggcggcacaaccccagtgccacgttgtgagttggatagttgtggaaagagtcaaatggctctcctcaagcgtattcaacaaggggctgaaggatgcccagaaggtaccccattgtatgggatctgatctggggcctcggtgcacatgctttacatgtgtttagtcgaggttaaaaaacgtctaggccccccgaaccacggggacgtggttttcctttgaaaaacacgatc

SEQ ID NO: 703 - DNA, 73 bp, Artificial Sequence
  Description of Artificial Sequence: Synthetic oligonucleotide
actagttttataatttcttcttccagaatttctgacattttataatttcttcttccagaagactcacaacctc

SEQ ID NO: 704 - DNA, 21 bp, Artificial Sequence
  Description of Artificial Sequence: Synthetic oligonucleotide
ttcaggaatgggttccaagga

SEQ ID NO: 705 - DNA, 23 bp, Artificial Sequence
  Description of Artificial Sequence: Synthetic oligonucleotide
ttcaggaatgggttccaaggatg

SEQ ID NO: 706 - DNA, 21 bp, Artificial Sequence
  Description of Artificial Sequence: Synthetic oligonucleotide
tcctggaagctattcctgacg

SEQ ID NO: 707 - DNA, 22 bp, Artificial Sequence
  Description of Artificial Sequence: Synthetic oligonucleotide
tcctggaagctattcctgacgt

SEQ ID NO: 708 - DNA, 23 bp, Artificial Sequence
  Description of Artificial Sequence: Synthetic oligonucleotide
tcctggaagctattcctgacgtt

SEQ ID NO: 709 - DNA, 21 bp, Artificial Sequence
  Description of Artificial Sequence: Synthetic oligonucleotide
tataatataatagaaccacag

SEQ ID NO: 710 - DNA, 23 bp, Artificial Sequence
  Description of Artificial Sequence: Synthetic oligonucleotide
tataatataatagaaccacagga

SEQ ID NO: 711 - DNA, 21 bp, Artificial Sequence
  Description of Artificial Sequence: Synthetic oligonucleotide
tgtggttctgttatatccata

SEQ ID NO: 712 - DNA, 22 bp, Artificial Sequence
  Description of Artificial Sequence: Synthetic oligonucleotide
tgtggttctgttatatccatat

SEQ ID NO: 713 - DNA, 23 bp, Artificial Sequence
  Description of Artificial Sequence: Synthetic oligonucleotide
tgtggttctgttatatccatata

SEQ ID NO: 714 - skipped

SEQ ID NO: 715 - protein, 8 aa, Artificial Sequence
  Description of Artificial Sequence: Synthetic peptide
GFTFSSYA

SEQ ID NO: 716 - protein, 7 aa, Artificial Sequence
  Description of Artificial Sequence: Synthetic peptide
ISRGGTT

SEQ ID NO: 717 - protein, 13 aa, Artificial Sequence
  Description of Artificial Sequence: Synthetic peptide
GRYDYDGYYAMDY

SEQ ID NO: 718 - protein, 5 aa, Artificial Sequence
  Description of Artificial Sequence: Synthetic peptide
SYAMS

SEQ ID NO: 719 - protein, 16 aa, Artificial Sequence
  Description of Artificial Sequence: Synthetic peptide
AISRGGTTYYADSVKG

SEQ ID NO: 720 - protein, 11 aa, Artificial Sequence
  Description of Artificial Sequence: Synthetic peptide
YDYDGYYAMDY

SEQ ID NO: 721 - protein, 6 aa, Artificial Sequence
  Description of Artificial Sequence: Synthetic peptide
PDINSY

SEQ ID NO: 722 - protein, 3 aa, Artificial Sequence
  Description of Artificial Sequence: Synthetic peptide
RAN

SEQ ID NO: 723 - protein, 9 aa, Artificial Sequence
  Description of Artificial Sequence: Synthetic peptide
LQYDEFPYT

SEQ ID NO: 724 - protein, 11 aa, Artificial Sequence
  Description of Artificial Sequence: Synthetic peptide
RASPDINSYLS

SEQ ID NO: 725 - protein, 7 aa, Artificial Sequence
  Description of Artificial Sequence: Synthetic peptide
RANTLES

SEQ ID NO: 726 - protein, 83 aa, Artificial Sequence
  Description of Artificial Sequence: Synthetic polypeptide
GFTFSSYAMSWVRQAPGKGLEWVSSISRGGTTYYPDSVKGRFTISRDNSKNTLYLQMNSLRAEDTAVYYCGRYDYDGYYAMDY

SEQ ID NO: 727 - protein, 73 aa, Artificial Sequence
  Description of Artificial Sequence: Synthetic polypeptide
ASPDINSYLNWYQQKPGKAPKLLIYRANRLVDGVPSRFSGSGSGTDYTLTISSLQPEDFATYYCLQYDEFPYT

SEQ ID NO: 728 - protein, 78 aa, Artificial Sequence
  Description of Artificial Sequence: Synthetic polypeptide
SYAMSWVRQAPGKGLEWVSSISRGGTTYYPDSVKGRFTISRDNSKNTLYLQMNSLRAEDTAVYYCGRYDYDGYYAMDY

SEQ ID NO: 729 - protein, 71 aa, Artificial Sequence
  Description of Artificial Sequence: Synthetic polypeptide
PDINSYLNWYQQKPGKAPKLLIYRANRLVDGVPSRFSGSGSGTDYTLTISSLQPEDFATYYCLQYDEFPYT

1. A non-naturally occurring polynucleotide encoding: (a) a miRNA that inhibits the expression of an immune checkpoint protein; and (b) a chimeric receptor.

2. The polynucleotide of claim 1, wherein the miRNA inhibits the expression of CTLA, PD-1, PD-L1, TIM3, TIGIT, LAG3, GITR, or PIK31P1.

3-6. (canceled)

7. The polynucleotide of claim 2, comprising a nucleic acid sequence having at least 80% sequence identity with SEQ ID NO: 267 or that is capable of hybridizing under stringent hybridization conditions to the complement of SEQ ID NO: 267.

8-9. (canceled)

10. The polynucleotide of claim 1, wherein the chimeric receptor is a T-cell receptor or a chimeric antigen receptor.

11-12. (canceled)

13. The polynucleotide of claim 10, wherein the chimeric antigen receptor comprises an antigen-binding domain that binds to an epitope on ROR1.

14. The polynucleotide of claim 13, wherein the chimeric antigen receptor comprises:
(a) a variable light chain domain comprising the amino acid sequence of any one of SEQ ID NOs: 347, 351, 355, 359, 363, 367, 371, 375, 379, 383, 387, 391, 395, 399, 403, 407, 411, 415, 419, 423, 427, 431, 435, 439, 443, 447, 451, 455, 459, and 463, or a functional fragment or variant thereof; and/or
(b) a variable heavy chain domain comprising the amino acid sequence of any one of SEQ ID NOs: 349, 353, 357, 361, 365, 369, 373, 377, 381, 385, 389, 393, 397, 401, 405, 409, 413, 417, 421, 425, 429, 433, 437, 441, 445, 449, 453, 457, and 461, or a functional fragment or variant thereof.

15-17. (canceled)

18. The polynucleotide of claim 10, wherein the chimeric antigen receptor comprises a spacer comprising: (a) a stalk region comprising the amino acid sequence of SEQ ID NO: 467, or a functional fragment or variant thereof; and (b) a stalk extension region comprising the amino acid sequence of SEQ ID NO: 473, or a functional fragment or variant thereof.

19-31. (canceled)

32. The polynucleotide of claim 1, further encoding a cytokine.

33-35. (canceled)

36. The polynucleotide of claim 32, encoding a fusion protein comprising: (a) IL-15, or a functional fragment or variant thereof; and (b) IL-15Rα, or a functional fragment or variant thereof.

37. The polynucleotide of claim 36, wherein the fusion protein comprises the amino acid sequence of SEQ ID NO: 523, or a functional fragment or variant thereof.

38. (canceled)

39. The polynucleotide of claim 1, further encoding a cell tag.

40-42. (canceled)

43. The polynucleotide of claim 39, wherein the cell tag comprises: (a) a truncated HER1, or a functional fragment or variant thereof; and a CD28 transmembrane domain, or a functional fragment or variant thereof.

44. (canceled)

45. A vector comprising the polynucleotide of claim 1.

46. (canceled)

47. The vector of claim 45, comprising a Sleeping Beauty transposon.

48. A modified immune effector cell comprising the polynucleotide of claim 1.

49. A composition comprising the polynucleotide of claim 1.

50-57. (canceled)

58. A method for detecting a disease or disorder associated with the overexpression of an antigen in a subject, the method comprising: a) contacting a sample from the subject with one or more of the antibodies, or antigen-binding fragments thereof; and b) detecting an increased level of binding of the antibody or fragment thereof to the sample as compared to such binding to a control sample lacking the disease, thereby detecting the disease in the subject.

59. A method for treating a disease or disorder comprising the serial administration of polynucleotides encoding a chimeric antigen receptor or a cell comprising the same, wherein the encoded chimeric antigen receptors are selected from a collection of chimeric antigen receptors having different structural compositions and binding specificities for an array of antigen targets.

60. (canceled)

61. A kit comprising the polynucleotide of claim 1.

62. A method of treating a subject suffering from a disease or disorder, comprising administering the cell of claim 48 to a subject in need thereof.
